(19) United States
(12) Patent Application Publication
(10) Pub. No.: US 2006/0008844 A1
(43) Pub. Date: Jan. 12, 2006

(54) c-Met kinase binding proteins

(75) Inventors: Willem P.C. Stemmer, Los Gatos, CA (US); D. Victor Perlroth, Palo Alto, CA (US); Sanjeev Satyal, San Carlos, CA (US)

Correspondence Address: TOWNSEND AND TOWNSEND AND CREW, LLP, TWO EMBARCADERO CENTER, EIGHTH FLOOR, SAN FRANCISCO, CA, 94111-3834, US

(73) Assignee: Avidia Research Institute, Mountain View, CA (US)

(21) Appl. No.: 10/957,351

(22) Filed: Sep. 30, 2004

Related U.S. Application Data
(63) Continuation-in-part of application No. 10/871,602, filed on Jun. 17, 2004.

(51) Int. Cl. G01N 33/53; A61K 38/17; C07K 14/47

(52) U.S. Cl. 435/7.1; 530/324; 514/12

(57) ABSTRACT

Polypeptides comprising monomer domains that bind to c-Met, or portions thereof, are provided.

### BACKGROUND OF THE INVENTION

[0001] Hepatocyte Growth Factor/Scatter Factor (HGF/SF) is a mesenchyme-derived pleiotropic factor, which regulates cell growth, cell motility, and morphogenesis of various types of cells and mediates epithelial-mesenchymal interactions responsible for morphogenic tissue interactions during embryonic development and organogenesis. Although HGF was originally identified as a potent mitogen for hepatocytes, it has also been identified as an angiogenic growth factor.

[0002] Met was first identified in the 1980s as an oncogene and is the receptor for HGF. The proto-oncogene c-Met, was found to encode a receptor tyrosine kinase. In response to HGF treatment a range of activities are observed: phosphorylation of receptor, docking of signaling intermediates Gab-1/Grb2, culminating in activation of kinases such as P13K, ERK1 and 2, and AKT. These activities aid in cell growth, survival, migration, and neovascularisation.

[0003] Inappropriate expression or signaling of the receptor tyrosine kinase Met and its ligand Hepatocyte Growth Factor/Scatter Factor (HGF/SF) is associated with an aggressive phenotype and poor clinical prognosis for a wide variety of solid human tumors.

[0004] Four lines of evidence cement the case for a role of c-Met in cancer:

[0005] First, mouse and human cell lines that ectopically overexpress HGF and/or Met become tumorigenic and metastatic in athymic nude mice. Secondly, downregulation of Met or HGF expression in human tumour cells decreases their tumorigenic potential. Mouse models that express the receptor or ligand as a transgene develop various types of tumour and metastatic tumors. Third, a large number of studies show that HGF and/or Met are frequently expressed in carcinomas, in other types of human solid tumours and in their metastases, and that HGF and/or Met over- or misexpression often correlates with poor prognosis. Fourth, unequivocal evidence that implicates Met in human cancer is provided by the activating mutations that have been discovered in both sporadic and inherited forms of human renal papillary carcinomas.

### BRIEF SUMMARY OF THE INVENTION

[0006] The present invention provides a polypeptide comprising a monomer domain that binds to c-Met. In some embodiments, the monomer domain:
[0007] is a non-naturally-occurring monomer domain consisting of 30 to 50 amino acids;
[0008] comprises at least one disulfide bond; and
[0009] binds to an ion.

[0010] In some embodiments, binding of at least one monomer domain to c-Met inhibits dimerization of Met. In some embodiments, at least one monomer domain binds to the Sema domain of c-Met, thereby preventing binding of Met ligands to c-Met.

[0011] In some embodiments, the polypeptide comprises at least one and no more than six monomer domains. In some embodiments, the polypeptide comprises at least two monomer domains and the monomer domains are linked by a linker. In some embodiments, the linker is a peptide linker. In some embodiments, the linker is between 4 to 12 amino acids long.

[0012] In some embodiments, the monomer domains are each between 35 to 45 amino acids.

[0013] In some embodiments, the polypeptide comprises at least one monomer domain with binding specificity for a blood factor, thereby increasing the serum half-life of the polypeptide compared to a polypeptide lacking the blood factor monomer domain. In some embodiments, the blood factor is serum albumin, an immunoglobulin or an erythrocyte.

[0014] In some embodiments, each monomer domain comprises two disulfide bonds. In some embodiments, each monomer domain comprises three disulfide bonds.

[0015] In some embodiments, the ion is a metal ion. In some embodiments, the ion is a calcium ion.

[0016] In some embodiments, at least one of the monomer domains is derived from a LDL-receptor class A domain. In some embodiments, at least one of the monomer domains is derived from an EGF-like domain.

[0017] In some embodiments, the monomer comprises an amino acid sequence in which at least 10% of the amino acids in the sequence are cysteine; and/or at least 25% of the amino acids are non-naturally-occurring amino acids.

[0018] The present invention also provides methods for identifying a polypeptide that binds to c-Met. In some embodiments, the method comprises,
[0019] screening a library of polypeptides for affinity to c-Met; and
[0020] selecting a polypeptide comprising at least one monomer domain that binds to c-Met, wherein the monomer domain:
[0021] is a non-naturally-occurring monomer domain;
[0022] comprises at least one disulfide bond; and
[0023] binds to an ion.

[0024] In some embodiments, the selecting step comprises selecting a polypeptide that reduces HGF-mediated cell proliferation and/or migration. In some embodiments, the method further comprises selecting a polypeptide that inhibits tumor growth in an animal.

[0025] In some embodiments, the monomer domain comprises an amino acid sequence in which at least 10% of the amino acids in the sequence are cysteine; and/or at least 25% of the amino acids are non-naturally-occurring amino acids.

[0026] In some embodiments, the method further comprises
[0027] linking the monomer domain in the selected polypeptide to a second monomer domain to form a library of multimers, each multimer comprising at least two monomer domains;
[0028] screening the library of multimers for the ability to bind to c-Met; and
[0029] selecting a multimer that binds c-Met.

[0030] In some embodiments, the method further comprises
[0031] linking the monomer domain in the selected polypeptide to a second monomer domain to form a library of multimers, each multimer comprising at least two monomer domains;
[0032] screening the library of multimers for the ability to bind to a target molecule other than the c-Met; and
[0033] selecting a multimer that binds to the target molecule.

[0034] In some embodiments, the method further comprises a step of mutating at least one monomer domain, thereby providing a library comprising mutated monomer domains.

[0035] In some embodiments, the library of monomer domains is expressed as a phage display, ribosome display or cell surface display.

[0036] In some embodiments, the polypeptide comprises at least two monomer domains and the monomer domains are linked by a linker. In some embodiments, the linker is a peptide linker. In some embodiments, the linker is between 4 to 12 amino acids long.

[0037] In some embodiments, the monomer domains are each between 35 to 45 amino acids.

[0038] In some embodiments, each monomer domain comprises two disulfide bonds. In some embodiments, each monomer domain comprises three disulfide bonds.

[0039] In some embodiments, the ion is a metal ion. In some embodiments, the ion is a calcium ion.

[0040] In some embodiments, at least one of the monomer domains is derived from a LDL-receptor class A domain. In some embodiments, at least one of the monomer domains is derived from an EGF-like domain.

[0041] In some embodiments, the monomer domain comprises an amino acid sequence in which at least 10% of the amino acids in the sequence are cysteine; and/or at least 25% of the amino acids are non-naturally-occurring amino acids.

[0042] The present invention also provides polynucleotides encoding a polypeptide comprising a monomer domain that binds to c-Met, wherein the monomer domain:
[0043] is a non-naturally-occurring monomer domain consisting of 30 to 50 amino acids;
[0044] comprises at least one disulfide bond; and
[0045] binds to an ion.

### DEFINITIONS

[0046] Unless otherwise indicated, the following definitions supplant those in the art.

[0047] “Met” also referred to as “c-Met,” refers to the Hepatocyte Growth Factor/Scatter Factor (HGF/SF)-binding receptor tyrosine kinase. In response to HGF treatment a range of activities are observed: phosphorylation of receptor, docking of signaling intermediates Gab-1/Grb2, culminating in activation of kinases such as P13K, ERK1 and 2, and AKT. These activities aid in cell growth, survival, migration, and neovascularisation. See, e.g., Birchmeier et al., Mol. Cell Biol. 4:915-925 (2003). The amino acid sequence of Met is known and is displayed in SEQ ID NO:1. See, e.g., Park et al., Proc. Natl. Acad. Sci. USA 84(18):6379 (1987).

[0048] The term “monomer domain” or “monomer” is used interchangeably herein refer to a discrete region found in a protein or polypeptide. A monomer domain forms a native three-dimensional structure in solution in the absence of flanking native amino acid sequences. Monomer domains of the invention will often bind to a target molecule. For example, a polypeptide that forms a three-dimensional structure that binds to a target molecule is a monomer domain. As used herein, the term “monomer domain” does not encompass the complementarity determining region (CDR) of an antibody.

[0049] The term “loop” refers to that portion of a monomer domain that is typically exposed to the environment by the assembly of the scaffold structure of the monomer domain protein, and which is involved in target binding. The present invention provides three types of loops that are identified by specific features, such as, potential for disulfide bonding, bridging between secondary protein structures, and molecular dynamics (i.e., flexibility). The three types of loop sequences are a cysteine-defined loop sequence, a structure-defined loop sequence, and a B-factor-defined loop sequence.

[0050] As used herein, the term “cysteine-defined loop sequence” refers to a subsequence of a naturally occurring monomer domain-encoding sequence that is bound at each end by a cysteine residue that is conserved with respect to at least one other naturally occurring monomer domain of the same family. Cysteine-defined loop sequences are identified by multiple sequence alignment of the naturally occurring monomer domains, followed by sequence analysis to identify conserved cysteine residues. The sequence between each consecutive pair of conserved cysteine residues is a cysteine-defined loop sequence. The cysteine-defined loop sequence does not include the cysteine residues adjacent to each terminus. Monomer domains having cysteine-defined loop sequences include the LDL receptor A-domains, EGF-like domains, sushi domains, Fibronectin type 1 domains, and the like. Thus, for example, in the case of LDL receptor A-domains represented by the consensus sequence, CX₆CX₄CX₆CX₅CX₈C (see also FIG. 9), wherein X₆, X₄, X₅, and X₈ each represent a cysteine-defined loop sequence comprising the designated number of amino acids.

[0051] As used herein, the term “structure-defined loop sequence” refers to a subsequence of a monomer-domain encoding sequence that is bound at each end to subsequences that each form a secondary structure. Secondary structures for proteins with known three dimensional structures are identified in accordance with the algorithm STRIDE for assigning protein secondary structure as described in Frishman, D. and Argos, P. (1995) “Knowledge-based secondary structure assignment,” Proteins, 23(4):566-79 (see also //hgmp.mrc.ac.uk/Registered/Option/stride.html at the World Wide Web). Secondary structures for proteins with unknown or uncharacterized three dimensional structures are identified in accordance with the algorithm described in Jones, D. T. (1999), “Protein secondary structure prediction based on position-specific scoring matrices,” J. Mol. Biol., 292:195-202 (see also McGuffin, L. J., Bryson, K., Jones, D. T. (2000) “The PSIPRED protein structure prediction server,” Bioinformatics, 16:404-405, and //bioinf.cs.ucl.ac.uk/psipred/ at the World Wide Web). Secondary structures include, for example, pleated sheets, helices, and the like. Examples of monomer domains having structure-defined loop sequences are the C2 domains, Ig domains, Factor 5/8 C domains, Fibronectin type 3 domains, and the like.

[0052] The term “B-factor-defined loop sequence” refers to a subsequence of at least three amino acid residues of a monomer-domain encoding sequence in which the B-factors for the alpha carbons in the B-factor-defined loop are among the 25% highest alpha carbon B factors in the entire monomer domain. Typically the average alpha-carbon B-factor for the subsequence is at least about 65. As used herein, the term “B-factor” (or “temperature factor” or “Debye-Waller factor”) is derived from X-ray scattering data. The B-factor is a factor that can be applied to the X-ray scattering term for each atom, or for groups of atoms, that describes the degree to which electron density is spread out B-factors employed in the practice of the present invention may be either isotropic or anisotropic. The term “average alpha-carbon B-factor” refers to:

$$( {\sum }_{i = 1}^{n} B \text{-} {factor}_{C α i} ) / n$$

where n corresponds to the number of residues in the loop, and is at least 3, and B-factor_{Cαi} is the B-factor for the alpha carbon of amino acid residue i of the loop.

[0053] The term “multimer” is used herein to indicate a polypeptide comprising at least two monomer domains. The separate monomer domains in a multimer can be joined together by a linker. A multimer is also known as a combinatorial mosaic protein or a recombinant mosaic protein.

[0054] The term “family” and “family class” are used interchangeably to indicate proteins that are grouped together based on similarities in their amino acid sequences. These similar sequences are generally conserved because they are important for the function of the protein and/or the maintenance of the three dimensional structure of the protein. Examples of such families include the LDL Receptor A-domain family, the EGF-like family, and the like.

[0055] The term “ligand,” also referred to herein as a “target molecule,” encompasses a wide variety of substances and molecules, which range from simple molecules to complex targets. Target molecules can be proteins, nucleic acids, lipids, carbohydrates or any other molecule capable of recognition by a polypeptide domain. For example, a target molecule can include a chemical compound (i.e., non-biological compound such as, e.g., an organic molecule, an inorganic molecule, or a molecule having both organic and inorganic atoms, but excluding polynucleotides and proteins), a mixture of chemical compounds, an array of spatially localized compounds, a biological macromolecule, a bacteriophage peptide display library, a polysome peptide display library, an extract made from a biological materials such as bacteria, plants, fungi, or animal (e.g., mammalian) cells or tissue, a protein, a toxin, a peptide hormone, a cell, a virus, or the like. Other target molecules include, e.g., a whole cell, a whole tissue, a mixture of related or unrelated proteins, a mixture of viruses or bacterial strains or the like. Target molecules can also be defined by inclusion in screening assays described herein or by enhancing or inhibiting a specific protein interaction (i.e., an agent that selectively inhibits a binding interaction between two predetermined polypeptides).

[0056] The term “linker” is used herein to indicate a moiety or group of moieties that joins or connects two or more discrete separate monomer domains. The linker allows the discrete separate monomer domains to remain separate when joined together in a multimer. The linker moiety is typically a substantially linear moiety. Suitable linkers include polypeptides, polynucleic acids, peptide nucleic acids and the like. Suitable linkers also include optionally substituted alkylene moieties that have one or more oxygen atoms incorporated in the carbon backbone. Typically, the molecular weight of the linker is less than about 2000 daltons. More typically, the molecular weight of the linker is less than about 1500 daltons and usually is less than about 1000 daltons. The linker can be small enough to allow the discrete separate monomer domains to cooperate, e.g., where each of the discrete separate monomer domains in a multimer binds to the same target molecule via separate binding sites. Exemplary linkers include a polynucleotide encoding a polypeptide, or a polypeptide of amino acids or other non-naturally occurring moieties. The linker can be a portion of a native sequence, a variant thereof, or a synthetic sequence. Linkers can comprise, e.g., naturally occurring, non-naturally occurring amino acids, or a combination of both.

[0057] The term “separate” is used herein to indicate a property of a moiety that is independent and remains independent even when complexed with other moieties, including for example, other monomer domains. A monomer domain is a separate domain in a protein because it has an independent property that can be recognized and separated from the protein. For instance, the ligand binding ability of the A-domain in the LDLR is an independent property. Other examples of separate include the separate monomer domains in a multimer that remain separate independent domains even when complexed or joined together in the multimer by a linker. Another example of a separate property is the separate binding sites in a multimer for a ligand.

[0058] As used herein, “directed evolution” refers to a process by which polynucleotide variants are generated, expressed, and screened for an activity (e.g., a polypeptide with binding activity) in a recursive process. One or more candidates in the screen are selected and the process is then repeated using polynucleotides that encode the selected candidates to generate new variants. Directed evolution involves at least two rounds of variation generation and can include 3, 4, 5, 10, 20 or more rounds of variation generation and selection. Variation can be generated by any method known to those of skill in the art, including, e.g., by error-prone PCR, gene recombination, chemical mutagenesis and the like.

[0059] The term “shuffling” is used herein to indicate recombination between non-identical sequences. In some embodiments, shuffling can include crossover via homologous recombination or via non-homologous recombination, such as via cre/lox and/or flp/frt systems. Shuffling can be carried out by employing a variety of different formats, including for example, in vitro and in vivo shuffling formats, in silico shuffling formats, shuffling formats that utilize either double-stranded or single-stranded templates, primer based shuffling formats, nucleic acid fragmentation-based shuffling formats, and oligonucleotide-mediated shuffling formats, all of which are based on recombination events between non-identical sequences and are described in more detail or referenced herein below, as well as other similar recombination-based formats. The term “random” as used herein refers to a polynucleotide sequence or an amino acid sequence composed of two or more amino acids and constructed by a stochastic or random process. The random polynucleotide sequence or amino acid sequence can include framework or scaffolding motifs, which can comprise invariant sequences.

[0060] The term “pseudorandom” as used herein refers to a set of sequences, polynucleotide or polypeptide, that have limited variability, so that the degree of residue variability at some positions is limited, but any pseudorandom position is allowed at least some degree of residue variation.

[0061] The terms “polypeptide,” “peptide,” and “protein” are used herein interchangeably to refer to an amino acid sequence of two or more amino acids.

[0062] The term “amino acid” refers to naturally occurring and synthetic amino acids, as well as amino acid analogs and amino acid mimetics that function in a manner similar to the naturally occurring amino acids. Naturally occurring amino acids are those encoded by the genetic code, as well as those amino acids that are later modified, e.g., hydroxyproline, γ-carboxyglutamate, and O-phosphoserine. Amino acid analogs refers to compounds that have the same basic chemical structure as a naturally occurring amino acid, i.e., an α carbon that is bound to a hydrogen, a carboxyl group, an amino group, and an R group, e.g., homoserine, norleucine, methionine sulfoxide, methionine methyl sulfonium. Such analogs have modified R groups (e.g., norleucine) or modified peptide backbones, but retain the same basic chemical structure as a naturally occurring amino acid. “Amino acid mimetics” refers to chemical compounds that have a structure that is different from the general chemical structure of an amino acid, but that functions in a manner similar to a naturally occurring amino acid.

[0063] “Conservative amino acid substitution” refers to the interchangeability of residues having similar side chains. For example, a group of amino acids having aliphatic side chains is glycine, alanine, valine, leucine, and isoleucine; a group of amino acids having aliphatic-hydroxyl side chains is serine and threonine; a group of amino acids having amide-containing side chains is asparagine and glutamine; a group of amino acids having aromatic side chains is phenylalanine, tyrosine, and tryptophan; a group of amino acids having basic side chains is lysine, arginine, and histidine; and a group of amino acids having sulfur-containing side chains is cysteine and methionine. Preferred conservative amino acids substitution groups are: valine-leucine-isoleucine, phenylalanine-tyrosine, lysine-arginine, alanine-valine, and asparagine-glutamine.

[0064] The phrase “nucleic acid sequence” refers to a single or double-stranded polymer of deoxyribonucleotide or ribonucleotide bases read from the 5′ to the 3′ end. It includes chromosomal DNA, self-replicating plasmids and DNA or RNA that performs a primarily structural role.

[0065] The term “encoding” refers to a polynucleotide sequence encoding one or more amino acids. The term does not require a start or stop codon. An amino acid sequence can be encoded in any one of six different reading frames provided by a polynucleotide sequence.

[0066] The term “promoter” refers to regions or sequence located upstream and/or downstream from the start of transcription that are involved in recognition and binding of RNA polymerase and other proteins to initiate transcription.

[0067] A “vector” refers to a polynucleotide, which when independent of the host chromosome, is capable of replication in a host organism. Examples of vectors include plasmids. Vectors typically have an origin of replication. Vectors can comprise, e.g., transcription and translation terminators, transcription and translation initiation sequences, and promoters useful for regulation of the expression of the particular nucleic acid.

[0068] The term “recombinant” when used with reference, e.g., to a cell, or nucleic acid, protein, or vector, indicates that the cell, nucleic acid, protein or vector, has been modified by the introduction of a heterologous nucleic acid or protein or the alteration of a native nucleic acid or protein, or that the cell is derived from a cell so modified. Thus, for example, recombinant cells express genes that are not found within the native (nonrecombinant) form of the cell or express native genes that are otherwise abnormally expressed, under-expressed or not expressed at all.

[0069] The phrase “specifically (or selectively) binds” to a polypeptide, when referring to a monomer or multimer, refers to a binding reaction that can be determinative of the presence of the polypeptide in a heterogeneous population of proteins (e.g., a cell or tissue lysate) and other biologics. Thus, under standard conditions or assays used in antibody binding assays, the specified monomer or multimer binds to a particular target molecule above background (e.g., 2×, 5×, 10× or more above background) and does not bind in a significant amount to other molecules present in the sample.

[0070] The terms “identical” or percent “identity,” in the context of two or more nucleic acids or polypeptide sequences, refer to two or more sequences or subsequences that are the same. “Substantially identical” refers to two or more nucleic acids or polypeptide sequences having a specified percentage of amino acid residues or nucleotides that are the same (i.e., 60% identity, optionally 65%, 70%, 75%, 80%, 85%, 90%, or 95% identity over a specified region, or, when not specified, over the entire sequence), when compared and aligned for maximum correspondence over a comparison window, or designated region as measured using one of the following sequence comparison algorithms or by manual alignment and visual inspection. Optionally, the identity or substantial identity exists over a region that is at least about 50 nucleotides in length, or more preferably over a region that is 100 to 500 or 1000 or more nucleotides or amino acids in length.

[0071] A polynucleotide or amino acid sequence is “heterologous to” a second sequence if the two sequences are not linked in the same manner as found in naturally-occurring sequences. For example, a promoter operably linked to a heterologous coding sequence refers to a coding sequence which is different from any naturally-occurring allelic variants. The term “heterologous linker,” when used in reference to a multimer, indicates that the multimer comprises a linker and a monomer that are not found in the same relationship to each other in nature (e.g., they form a non-naturally occurring fusion protein).

[0072] A “non-naturally-occurring amino acid” in a protein sequence refers to any amino acid other than the amino acid that occurs in the corresponding position in an alignment with a naturally-occurring polypeptide with the lowest smallest sum probability where the comparison window is the length of the monomer domain queried and when compared to the non-redundant (“nr”) database of Genbank using BLAST 2.0 as described herein.

[0073] “Percentage of sequence identity” is determined by comparing two optimally aligned sequences over a comparison window, wherein the portion of the polynucleotide sequence in the comparison window may comprise additions or deletions (i.e., gaps) as compared to the reference sequence (which does not comprise additions or deletions) for optimal alignment of the two sequences. The percentage is calculated by determining the number of positions at which the identical nucleic acid base or amino acid residue occurs in both sequences to yield the number of matched positions, dividing the number of matched positions by the total number of positions in the window of comparison and multiplying the result by 100 to yield the percentage of sequence identity.

[0074] The terms “identical” or percent “identity,” in the context of two or more nucleic acids or polypeptide sequences, refer to two or more sequences or subsequences that are the same or have a specified percentage of amino acid residues or nucleotides that are the same, when compared and aligned for maximum correspondence over a comparison window, or designated region as measured using one of the following sequence comparison algorithms or by manual alignment and visual inspection. Such sequences are then said to be “substantially identical.” This definition also refers to the complement of a test sequence. Optionally, the identity exists over a region that is at least about 50 amino acids or nucleotides in length, or more preferably over a region that is 75-100 amino acids or nucleotides in length.

[0075] For sequence comparison, typically one sequence acts as a reference sequence, to which test sequences are compared. When using a sequence comparison algorithm, test and reference sequences are entered into a computer, subsequence coordinates are designated, if necessary, and sequence algorithm program parameters are designated. Default program parameters can be used, or alternative parameters can be designated. The sequence comparison algorithm then calculates the percent sequence identities for the test sequences relative to the reference sequence, based on the program parameters.

[0076] A “comparison window”, as used herein, includes reference to a segment of any one of the number of contiguous positions selected from the group consisting of from 20 to 600, usually about 50 to about 200, more usually about 100 to about 150 in which a sequence may be compared to a reference sequence of the same number of contiguous positions after the two sequences are optimally aligned. Methods of alignment of sequences for comparison are well-known in the art. Optimal alignment of sequences for comparison can be conducted, e.g., by the local homology algorithm of Smith and Waterman (1970) Adv. Appl. Math. 2:482c, by the homology alignment algorithm of Needleman and Wunsch (1970) J. Mol. Biol. 48:443, by the search for similarity method of Pearson and Lipman (1988) Proc. Nat'l. Acad. Sci. USA 85:2444, by computerized implementations of these algorithms (GAP, BESTFIT, FASTA, and TFASTA in the Wisconsin Genetics Software Package, Genetics Computer Group, 575 Science Dr., Madison, Wis.), or by manual alignment and visual inspection (see, e.g., Ausubel et al., Current Protocols in Molecular Biology (1995 supplement)).

[0077] One example of a useful algorithm is the BLAST 2.0 algorithm, which is described in Altschul et al. (1990) J. Mol. Biol. 215:403-410, respectively. Software for performing BLAST analyses is publicly available through the National Center for Biotechnology Information (http://www.ncbi.nlm.nih.gov/). This algorithm involves first identifying high scoring sequence pairs (HSPs) by identifying short words of length W in the query sequence, which either match or satisfy some positive-valued threshold score T when aligned with a word of the same length in a database sequence. T is referred to as the neighborhood word score threshold (Altschul et al., supra). These initial neighborhood word hits act as seeds for initiating searches to find longer HSPs containing them. The word hits are extended in both directions along each sequence for as far as the cumulative alignment score can be increased. Cumulative scores are calculated using, for nucleotide sequences, the parameters M (reward score for a pair of matching residues; always >0) and N (penalty score for mismatching residues; always <0). For amino acid sequences, a scoring matrix is used to calculate the cumulative score. Extension of the word hits in each direction are halted when the cumulative alignment score falls off by the quantity X from its maximum achieved value; the cumulative score goes to zero or below, due to the accumulation of one or more negative-scoring residue alignments; or the end of either sequence is reached. The BLAST algorithm parameters W, T, and X determine the sensitivity and speed of the alignment. The BLASTN program (for nucleotide sequences) uses as defaults a wordlength (W) of 11, an expectation (E) or 10, M=5, N=−4 and a comparison of both strands. For amino acid sequences, the BLASTP program uses as defaults a wordlength of 3, and expectation (E) of 10, and the BLOSUM62 scoring matrix (see Henikoff and Henikoff (1989) Proc. Natl. Acad. Sci. USA 89:10915) alignments (B) of 50, expectation (E) of 10, M=5, N=−4, and a comparison of both strands.

[0078] The BLAST algorithm also performs a statistical analysis of the similarity between two sequences (see, e.g., Karlin and Altschul (1993) Proc. Natl. Acad. Sci. USA 90:5873-5787). One measure of similarity provided by the BLAST algorithm is the smallest sum probability (P(N)), which provides an indication of the probability by which a match between two nucleotide or amino acid sequences would occur by chance. For example, a nucleic acid is considered similar to a reference sequence if the smallest sum probability in a comparison of the test nucleic acid to the reference nucleic acid is less than about 0.2, more preferably less than about 0.01, and most preferably less than about 0.001.

### BRIEF DESCRIPTION OF THE DRAWINGS

[0079] FIG. 1 schematically illustrates the type, number and order of monomer domains found in members of the LDL-receptor family. These monomer domains include β-Propeller domains, EGF-like domains and LDL receptor class A-domains. The members shown include low-density lipoprotein receptor (LDLR), ApoE Receptor 2 (ApoER2), very-low-density lipoprotein receptor (VLDLR), LDLR-related protein 2 (LRP2) and LDLR-related protein 1 (LRP1).

[0080] FIG. 2 schematically illustrates the alignment of partial amino acid sequence from a variety of the LDL-receptor class A-domains (SEQ ID NOS: 103, 100, 65, 117, 128, 21, 29, 39, 30, 77, 58, 50, and 14, respectively in order of appearance) to demonstrate the conserved cysteines.

[0081] FIG. 3, panel A schematically illustrates an example of an A-domain. Panel A schematically illustrates conserved amino acids in an A-domain of about 40 amino acids long. The conserved cysteine residues are indicated by C, and the negatively charged amino acids are indicated by a circle with a minus (“−”) sign. Circles with an “H” indicate hydrophobic residues. Panel B schematically illustrates two folded A-domains connected via a linker. Panel B also indicates two calcium binding sites, dark circles with Ca⁺², and three disulfide bonds within each folded A-domain for a total of 6 disulfide bonds.

[0082] FIG. 4 indicates some of the ligands recognized by the LDL-receptor family, which include inhibitors, proteases, protease complexes, vitamin-carrier complexes, proteins involved in lipoprotein metabolism, non-human ligands, antibiotics, viruses, and others.

[0083] FIG. 5 schematically illustrates a general scheme for identifying monomer domains that bind to a ligand, isolating the selected monomer domains, creating multimers of the selected monomer domains by joining the selected monomer domains in various combinations and screening the multimers to identify multimers comprising more than one monomer that binds to a ligand.

[0084] FIG. 6 is a schematic representation of another selection strategy (guided selection). A monomer domain with appropriate binding properties is identified from a library of monomer domains. The identified monomer domain is then linked to monomer domains from another library of monomer domains to form a library of multimers. The multimer library is screened to identify a pair of monomer domains that bind simultaneously to the target. This process can then be repeated until the optimal binding properties are obtained in the multimer.

[0085] FIG. 7 shows the multimerization process of monomer domains. The target-binding monomer hits are amplified from a vector. This mixture of target-binding monomer domains is then cleaved and mixed with an optimal combination of linker and stopper oligonucleotides. The multimers that are generated are then cloned into a suitable vector for the second selection step for identification of target-binding multimers.

[0086] FIG. 8 depicts common amino acids in each position of the A domain. The percentages above the amino acid positions refer to the percentage of naturally-occurring A domains with the inter-cysteine spacing displayed. Potential amino acid residues in bold depicted under each amino acid position represent common residues at that position. The final six amino acids, depicted as lighter-colored circles, represent linker sequences. The two columns of italicized amino acid residues at positions 2 and 3 of the linker represent amino acid residues that do not occur at that position. Any other amino acid (e.g., A, D, E, G, H, I, K, L, N, P, Q, R, S, T, and V) may be included at these positions.

[0087] FIG. 9 displays the frequency of occurrence of amino acid residues in naturally-occurring A domains for A domains with the following spacing between cysteines: CX₆CX₄CX₆CX₅CX₈C (SEQ ID NO: 199).

[0088] FIG. 10 depicts an alignment of A domains (SEQ ID NO: 1-197). At the top and the bottom of the figure, small letters (a-q) indicate conserved residues.

[0089] FIG. 11 depicts linkage of domains via partial linkers.

[0090] FIG. 12 is a graphical representation of the regions of sequence identity between the sequences of two different selected clones and known human sequences from a database. The horizontal bars indicate areas of sequence identity between the sequence of the selected clone and the human sequence and the numbers indicate the exact amino acid numbers that define the region of identity. The vertical arrow depicts an acceptable crossover sequence.

[0091] FIG. 13 illustrates screening a library of monomer domains against multiple ligands displayed on a cell.

[0092] FIG. 14 illustrates identification of monomers that were selected to bind to one of a plurality of ligands.

[0093] FIG. 15 illustrates an embodiment for identifying polynucleotides encoding ligands and monomer domains.

[0094] FIG. 16 illustrates monomer domain and multimer embodiments for increased avidity. While the figure illustrates specific gene products and binding affinities, it is appreciated that these are merely examples and that other binding targets can be used with the same or similar conformations.

[0095] FIG. 17 illustrates monomer domain and multimer embodiments for increased avidity. While the figure illustrates specific gene products and binding affinities, it is appreciated that these are merely examples and that other binding targets can be used with the same or similar conformations.

[0096] FIG. 18 illustrates various possible antibody-monomer or multimer conformations. In some embodiments, the monomer or multimer replaces the Fab fragment of the antibody.

[0097] FIG. 19 illustrates a method for intradomain optimization of monomers.

[0098] FIG. 20 illustrates a possible sequence of multimer optimization steps in which optimal monomers and then multimers are selected followed by optimization of monomers, optimization of linkers and then optimization of multimers.

[0099] FIG. 21 illustrates four possible ways to recombine monomer and/or multimer libraries to introduce new variation.

[0100] FIG. 22 depicts a possible conformation of a multimer of the invention comprising at least one monomer domain that binds to a half-life extending molecule and other monomer domains binding to two other different molecules. In the Figure, two monomer domains bind to a first target molecule and a separate monomer domain binds to a second target molecule.

### DETAILED DESCRIPTION OF THE INVENTION

I. Introduction

[0101] The present invention provides for non-naturally-occurring proteins that bind to c-Met. Generally, the proteins of the present invention comprise a domain that binds to c-Met. These domains may be readily identified using a variety of polypeptide scaffolds to generate a plurality of polypeptide variants and then selecting a variant that binds to c-Met. The present invention therefore also provides for selecting a protein that binds to c-Met. Proteins that bind c-Met are useful, e.g., for treating individuals with solid tumors that express c-Met. The polypeptides of the invention are also useful to detect tissues in which Met is expressed and can be used to target molecules to those tissues.

[0102] c-Met is inactive in its resting monomer state and dimer formation results in receptor activation (often even in absence of ligand binding). The mature form of the receptor consists of a solely extracellular α chain and a longer β chain encompassing the remainder of the extracellular domain, a transmembrane domain and a cytoplasmic tail. The cytoplasmic tail contains the juxtamembrane domain, a kinase domain and docking sites for signaling intermediates. The α chain and the first 212 amino acids of the β also known as the Sema domain (Kong-Beltran, et al., Cancer Cell 6:75-84 (2004), are sufficient for binding to HGF. The rest of the extracellular portion of the β chain consists of a cysteine-rich C domain and four repeats of an unusual immunoglobulin domain. Accordingly, in some embodiments, the polypeptides of the invention comprise at least one monomer domain that inhibits dimerization of c-Met α and β chains and/or functions as an antagonist to prevent ligands of c-Met from binding and/or activating c-Met.

[0103] While the present invention provides for polypeptides comprising single domains, multimers of the domains may also be synthesized and used. In some embodiments, all of the domains of the multimer bind c-Met. In some of these embodiments, each of the domains are identical and bind to the same portion (i.e., “epitope”) of c-Met. FOr example, in some embvodiments, the monomer domains bind to the Sema domain of c-Met. In other embodiments, at least some of the domains in the multimer bind to different portions of c-Met. In yet other embodiments, at least some of the domains of the polypeptide bind to a molecule or molecules other than c-Met.

II. Monomers

[0104] Monomer domains can be polypeptide chains of any size. In some embodiments, monomer domains have about 25 to about 500, about 30 to about 200, about 30 to about 100, about 35 to about 50, about 35 to about 100, about 90 to about 200, about 30 to about 250, about 30 to about 60, about 9 to about 150, about 100 to about 150, about 25 to about 50, or about 30 to about 150 amino acids. Similarly, a monomer domain of the present invention can comprise, e.g., from about 30 to about 200 amino acids; from about 25 to about 180 amino acids; from about 40 to about 150 amino acids; from about 50 to about 130 amino acids; or from about 75 to about 125 amino acids. Monomer domains can typically maintain a stable conformation in solution, and are often heat stable, e.g., stable at 95° C. for at least 10 minutes without losing binding affinity. Sometimes, monomer domains can fold independently into a stable conformation. In one embodiment, the stable conformation is stabilized by ions (e.g., such as metal or calcium ions). The stable conformation can optionally contain disulfide bonds (e.g., at least one, two, or three or more disulfide bonds). The disulfide bonds can optionally be formed between two cysteine residues. In some embodiments, monomer domains, or monomer domain variants, are substantially identical to the sequences exemplified (e.g., LDL A domains, EGF domains, etc., or otherwise referenced herein.

[0105] The invention provides monomer domains that bind to c-Met or a portion thereof. A portion of a polypeptide can be, e.g., at least 5, 10, 15, 20, 30, 50, 100, or more contiguous amino acids of the polypeptide.

[0106] A publication describing monomer domains and mosaic proteins include PCT Publication No. WO 2004/044011 and references cited within.

[0107] Monomer domains that are particularly suitable for use in the practice of the present invention are (1) β sandwich domains; (2) β-barrel domains; or (3) cysteine-rich domains comprising disulfide bonds. Cysteine-rich domains employed in the practice of the present invention typically do not form an α helix, a β sheet, or a β-barrel structure. Typically, the disulfide bonds promote folding of the domain into a three-dimensional structure. Usually, cysteine-rich domains have at least two disulfide bonds, more typically at least three disulfide bonds. In some embodiments, at least 5, 10, 15 or 20% of the amino acids in a monomer domain are cysteines.

[0108] Domains can have any number of characteristics. For example, in some embodiments, the domains have low or no immunogenicity in an animal (e.g., a human). Domains can have a small size. In some embodiments, the domains are small enough to penetrate skin or other tissues. Domains can have a range of in vivo half-lives or stabilities.

[0109] Illustrative monomer domains suitable for use in the practice of the present invention include, e.g., an EGF-like domain, a Kringle-domain, a fibronectin type I domain, a fibronectin type II domain, a fibronectin type III domain, a PAN domain, a Gla domain, a SRCR domain, a Kunitz/Bovine pancreatic trypsin Inhibitor domain, a Kazal-type serine protease inhibitor domain, a Trefoil (P-type) domain, a von Willebrand factor type C domain, an Anaphylatoxin-like domain, a CUB domain, a thyroglobulin type I repeat, LDL-receptor class A domain, a Sushi domain, a Link domain, a Thrombospondin type I domain, an Immunoglobulin-like domain, a C-type lectin domain, a MAM domain, a von Willebrand factor type A domain, a Somatomedin B domain, a WAP-type four disulfide core domain, a F5/8 type C domain, a Hemopexin domain, an SH2 domain, an SH3 domain, a Laminin-type EGF-like domain, a C2 domain, and other such domains known to those of ordinary skill in the art, as well as derivatives and/or variants thereof. In some embodiments, the monomer domain is not the C2 domain. FIG. 1 schematically diagrams various kinds of monomer domains found in molecules in the LDL-receptor family.

[0110] In some embodiments, suitable monomer domains (e.g. domains with the ability to fold independently or with some limited assistance) can be selected from the families of protein domains that contain β-sandwich or β-barrel three dimensional structures as defined by such computational sequence analysis tools as Simple Modular Architecture Research Tool (SMART), see Shultz et al., SMART: a web-based tool for the study of genetically mobile domains, (2000) Nucleic Acids Research 28(1):231-234) or CATH (see Pearl et. al., Assigning genomic sequences to CATH, (2000) Nucleic Acids Research 28(1):277-282).

[0111] In another embodiment, monomer domains of the present invention include domains other than a fibronectin type III domain, an anticalin domain and a Ig-like domain from CTLA-4. Some aspects of these domains are described in WO 01/64942 entitled “Protein scaffolds for antibody mimics and other binding proteins” by Lipovsek et al., published on Sep. 7, 2001, WO99/16873 entitled “Anticalins” by Beste et al., published Apr. 8, 1999 and WO 00/60070 entitled “A polypeptide structure for use as a scaffold” by Desmet, et al., published on Oct. 12, 2000.

[0112] As described supra, monomer domains are optionally cysteine rich. Suitable cysteine rich monomer domains include, e.g., the LDL receptor class A domain (“A-domain”) or the EGF-like domain. The monomer domains can also have a cluster of negatively charged residues. Optionally, the monomer domains contain a repeated sequence, such as YWTD (SEQ ID NO: 198) as found in the β-Propeller domain.

[0113] Other features of monomer domains can include the ability to bind ligands (e.g., as in the LDL receptor class A domain, or the CUB domain (complement C1r/C1s, Uegf, and bone morphogenic protein-1 domain)), the ability to participate in endocytosis or internalization (e.g., as in the cytoplasmic tail of the LDL receptor or the cytoplasmic tail of Megalin), the ability to bind an ion (e.g., Ca²⁺ binding by the LDL receptor A-domain), and/or the ability to be involved in cell adhesion (e.g., as in the EGF-like domain). Monomer domains that bind ions to maintain their secondary structure include, e.g., A domain, EGF domain, EF Hand (e.g., such as those found in present in calmodulin and troponin C), Cadherin domain, C-type lectin, C2 domain, Annexin, Gla-domain, Trombospondin type 3 domain, all of which bind calcium, and zinc fingers (e.g., C2H2 type C3HC4 type (RING finger), Integrase Zinc binding domain, PHD finger, GATA zinc finger, FYVE zinc finger, B-box zinc finger), which bind zinc. Without intending to limit the invention, it is believed that ion-binding provides stability of secondary structure while providing sufficient flexibility to allow for numerous binding conformations depending on primary sequence.

[0114] Characteristics of a monomer domain can include the ability to fold independently and the ability to form a stable structure. Thus, the structure of the monomer domain is often conserved, although the polynucleotide sequence encoding the monomer need not be conserved. For example, the A-domain structure is conserved among the members of the A-domain family, while the A-domain nucleic acid sequence is not. Thus, for example, a monomer domain is classified as an A-domain by its cysteine residues and its affinity for calcium, not necessarily by its nucleic acid sequence. See, FIG. 2.

[0115] As described herein, monomer domains may be selected for the ability to bind to targets other than the target that a homologous naturally occurring domain may bind. Thus, in some embodiments, the invention provides monomer domains (and multimers comprising such monomers) that do not bind to the target or the class or family of target proteins that a homologous naturally occurring domain may bind.

[0116] Specifically, the A-domains (sometimes called “complement-type repeats”) contain about 30-50 or 30-65 amino acids. In some embodiments, the domains comprise about 35-45 amino acids and in some cases about 40 amino acids. Within the 30-50 amino acids, there are about 6 cysteine residues. Of the six cysteines, disulfide bonds typically are found between the following cysteines: C1 and C3, C2 and C5, C4 and C6. The cysteine residues of the domain are disulfide linked to form a compact, stable, functionally independent moiety. See, FIG. 3. Clusters of these repeats make up a ligand binding domain, and differential clustering can impart specificity with respect to the ligand binding.

[0117] Exemplary A domain sequences and consensus sequences are depicted in FIGS. 2, 3 and 8. FIG. 9 displays location and occurrence of residues in A domains with the following spacing between cysteines. In addition, FIG. 10 depicts a number of A domains and provides a listing of conserved amino acids. One typical consensus sequence useful to identify A domains is the following: C-[VILMA]-X₍₅₎—C-[DNH]-X₍₃₎-[DENQHT]—C—X_{(3,4)}-[STADE]-[DEH]-[DE]-X_{(1,5)}—C (SEQ ID NO: 200), where the residues in brackets indicate possible residues at one position. “X_{(#)}” indicates number of residues. These residues can be any amino acid residue. Parentheticals containing two numbers refers to the range of amino acids that can occupy that position (e.g., “[DE]-X_{(1,5)}—C” means that the amino acids DE are followed by 1, 2, 3, 4, or 5 residues, followed by C). This consensus sequence only represents the portion of the A domain beginning at the third cysteine. A second consensus is as follows: C—X₍₃₋₁₅₎—C—X_{(4-15)—C—X}₍₆₋₇₎—C-[N,D]-X₍₃₎-[D,E,N,Q,H,S,T]-C—X₍₄₋₆₎-D-E-X₍₂₋₈₎—C (SEQ ID NO: 201). The second consensus predicts amino acid residues spanning all six cysteine residues. In some embodiments, A domain variants comprise sequences substantially identical to any of the above-described sequences.

[0118] Additional exemplary A domains include the following sequence:
[0119] CₐX₃₋₁₅C_{b}X₃₋₁₅C_{c}X₆₋₇C_{d}(D,N)X₄CₑX₄₋₆DEX₂₋₈C_{f}
[0120] wherein C is cysteine, Xₙ₋ₘ represents between n and m number of independently selected amino acids, and (D,N) indicates that the position can be either D or N; and wherein Cₐ-C_{c}, C_{b}-Cₑ and C_{d}-C_{f} form disulfide bonds.

[0121] In some embodiments, the monomer domain is an LDL receptor class A domain monomer comprising the following sequence:
[0122] CaX₆₋₇C_{b}X₄₋₅C_{c}X₆C_{d}X₅CₑX₈₋₁₀C_{f}
[0123] wherein X is defined as follows:
   The table above indicates alternative amino acid residues at each position of the LDL receptor class A monomer domain. For example, there can be either 6 or 7 amino acids between cystein C1 and cystein C2. The upper left box of the table indicates alternative amino acid residues at each position if there are 6 amino acids between C1 and C2. The bottom left box in the table indicates alternative amino acid residues of there are seven amino acids between C1 and C2. In all cases, the amino acid for one position (e.g., X1) is selected independently of the amino acids selected for remaining positions (e.g., X2, X3, etc.)

[0124] To date, at least 190 human A-domains are identified based on cDNA 10 sequences. See, e.g., FIG. 10. Exemplary proteins containing A-domains include, e.g., complement components (e.g., C6, C7, C8, C9, and Factor I), serine proteases (e.g., enteropeptidase, matriptase, and corin), transmembrane proteins (e.g., ST7, LRP3, LRP5 and LRP6) and endocytic receptors (e.g., Sortilin-related receptor, LDL-receptor, VLDLR, LRP1, LRP2, and ApoER2). A domains and A domain variants can be readily employed in the practice of the present invention as monomer domains and variants thereof. Further description of A domains can be found in the following publications and references cited therein: Howell and Hertz, The LDL receptor gene family: signaling functions during development, (2001) Current Opinion in Neurobiology 11:74-81; Herz (2001), supra; Krieger, The “best” of cholesterols, the “worst” of cholesterols: A tale of two receptors, (1998) PNAS 95: 4077-4080; Goldstein and Brown, The Cholesterol Quartet, (2001) Science, 292: 1310-1312; and, Moestrup and Verroust, Megalin-and Cubilin-Mediated Endocytosis of Protein-Bound Vitamins, Lipids, and Hormones in Polarized Epithelia, (2001) Ann. Rev. Nutr. 21:407-28.

[0125] Other examples of monomer domains can be found in the protein Cubilin, which contains EGF-type repeats and CUB domains. The CUB domains are involved in ligand binding, e.g., some ligands include intrinsic factor (IF)-vitamin B12, receptor associated protein (RAP), Apo A-I, Transferrin, Albumin, Ig light chains and calcium. See, Moestrup and Verroust, supra.

[0126] Megalin also contains multiple monomer domains. Specifically, megalin possesses LDL-receptor type A-domain, EGF-type repeat, a transmembrane segment and a cytoplasmic tail. Megalin binds a diverse set of ligands, e.g., ApoB, ApoE, ApoJ, clusterin, ApopH/Beta2-glycoprotein-I, PTH, Transthyretin, Thyroglobulin, Insulin, Aminoglycosides, Polymyxin B, Aprotinin, Trichosanthin, PAI-1, PAI-1-urokinase, PAI-1-tPA, Pro-urokinase, Lipoprotein lipase, alpha-Amylase, Albumin, RAP, Ig light chains, calcium, C1q, Lactoferrin, beta2-microglobulin, EGF, Prolactin, Lysozyme, Cytochrome c, PAP-1, Odorant-binding protein, seminal vesicle secretory protein II. See, Moestrup & Verroust, supra.

[0127] Exemplary EGF monomer domains include the sequence:
[0128] CₐX₃₋₁₄C_{b}X₃₋₇C_{c}X₄₋₁₆C_{d}X₁₋₂CₑX₈₋₂₃C_{f}
[0129] wherein C is cysteine, Xₙ₋ₘ represents between n and m number of independently selected amino acids; and
[0130] wherein Cₐ-C_{c}, C_{b}-Cₑ and C_{d}-C_{f} form disulfide bonds.

[0131] In some embodiments, the monomer domain is an EGF domain monomer comprising the following sequence:
[0132] CₐX₄₋₆C_{b}X₃₋₅C_{c}X₈₋₉C_{d}X₁CₑX₈₋₁₂C_{f}
[0133] wherein X is defined as follows:
   EGF monomer domains are sometimes between 25-45 amino acids and typically 30-39 amino acids.

[0134] Polynucleotides (also referred to as nucleic acids) encoding the monomer domains are typically employed to make monomer domains via expression. Nucleic acids that encode monomer domains can be derived from a variety of different sources. Libraries of monomer domains can be prepared by expressing a plurality of different nucleic acids encoding naturally occurring monomer domains, altered monomer domains (i.e., monomer domain variants), or a combinations thereof. For example, libraries may be designed in which a scaffold of amino acids remain constant (e.g., an LDL A receptor domain, EGF domain) while the intervening amino acids in the scaffold comprise randomly generated amino acids.

[0135] The invention provides methods of identifying monomer domains that bind to a selected or desired ligand or mixture of ligands. In some embodiments, monomer domains are identified or selected for a desired property (e.g., binding affinity) and then the monomer domains are formed into multimers. See, e.g., FIG. 5. For those embodiments, any method resulting in selection of domains with a desired property (e.g., a specific binding property) can be used. For example, the methods can comprise providing a plurality of different nucleic acids, each nucleic acid encoding a monomer domain; translating the plurality of different nucleic acids, thereby providing a plurality of different monomer domains; screening the plurality of different monomer domains for binding of the desired ligand or a mixture of ligands; and, identifying members of the plurality of different monomer domains that bind the desired ligand or mixture of ligands.

[0136] As mentioned above, monomer domains can be naturally-occurring or altered (non-natural variants). The term “naturally occurring” is used herein to indicate that an object can be found in nature. For example, natural monomer domains can include human monomer domains or optionally, domains derived from different species or sources, e.g., mammals, primates, rodents, fish, birds, reptiles, plants, etc. The natural occurring monomer domains can be obtained by a number of methods, e.g., by PCR amplification of genomic DNA or cDNA.

[0137] Monomer domains of the present invention can be naturally-occurring domains or non-naturally occurring variants. Libraries of monomer domains employed in the practice of the present invention may contain naturally-occurring monomer domain, non-naturally occurring monomer domain variants, or a combination thereof.

[0138] Monomer domain variants can include ancestral domains, chimeric domains, randomized domains, mutated domains, and the like. For example, ancestral domains can be based on phylogenetic analysis. Chimeric domains are domains in which one or more regions are replaced by corresponding regions from other domains of the same family. For example, chimeric domains can be constructed by combining loop sequences from multiple related domains of the same family to form novel domains with potentially lowered immunogenicity. Those of skill in the art will recognized the immunologic benefit of constructing modified binding domain monomers by combining loop regions from various related domains of the same family rather than creating random amino acid sequences. For example, by constructing variant domains by combining loop sequences or even multiple loop sequences that occur naturally in human LDL receptor class A-domains, the resulting domains may contain novel binding properties but may not contain any immunogenic protein sequences because all of the exposed loops are of human origin. The combining of loop amino acid sequences in endogenous context can be applied to all of the monomer constructs of the invention. Thus the present invention provides a method for generating a library of chimeric monomer domains derived from human proteins, the method comprising: providing loop sequences corresponding to at least one loop from each of at least two different naturally occurring variants of a human protein, wherein the loop sequences are polynucleotide or polypeptide sequences; and covalently combining loop sequences to generate a library of at least two different chimeric sequences, wherein each chimeric sequence encodes a chimeric monomer domain having at least two loops. Typically, the chimeric domain has at least four loops, and usually at least six loops. As described above, the present invention provides three types of loops that are identified by specific features, such as, potential for disulfide bonding, bridging between secondary protein structures, and molecular dynamics (i.e., flexibility). The three types of loop sequences are a cysteine-defined loop sequence, a structure-defined loop sequence, and a B-factor-defined loop sequence.

[0139] Randomized domains are domains in which one or more regions are randomized. The randomization can be based on full randomization, or optionally, partial randomization based on natural distribution of sequence diversity.

[0140] Compositions of nucleic acids and polypeptides are included in the present invention. For example, the present invention provides a plurality of different nucleic acids wherein each nucleic acid encodes at least one monomer domain or immuno-domain.

[0141] The present invention also provides recombinant nucleic acids encoding one or more polypeptides comprising a plurality of monomer domains and/or immuno-domains, which monomer domains are altered in order or sequence as compared to a naturally occuring polypeptide. For example, the naturally occuring polypeptide can be selected from the group consisting of: an EGF-like domain, a Kringle-domain, a fibronectin type I domain, a fibronectin type II domain, a fibronectin type III domain, a PAN domain, a Gla domain, a SRCR domain, a Kunitz/Bovine pancreatic trypsin Inhibitor domain, a Kazal-type serine protease inhibitor domain, a Trefoil (P-type) domain, a von Willebrand factor type C domain, an Anaphylatoxin-like domain, a CUB domain, a thyroglobulin type I repeat, LDL-receptor class A domain, a Sushi domain, a Link domain, a Thrombospondin type I domain, an Immunoglobulin-like domain, a C-type lectin domain, a MAM domain, a von Willebrand factor type A domain, a Somatomedin B domain, a WAP-type four disulfide core domain, a F5/8 type C domain, a Hemopexin domain, an SH2 domain, an SH3 domain, a Laminin-type EGF-like domain, a C2 domain and variants of one or more thereof. In another embodiment, the naturally occuring polypeptide encodes a monomer domain found in the Pfam database and/or the SMART database.

[0142] All the compositions of the present invention, including the compositions produced by the methods of the present invention, e.g., monomer domains and/or immuno-domains, as well as multimers and libraries thereof can be optionally bound to a matrix of an affinity material. Examples of affinity material include beads, a column, a solid support, a microarray, other pools of reagent-supports, and the like.

III. Multimers

[0143] Methods for generating multimers are a feature of the present invention. Multimers comprise at least two monomer domains. For example, multimers of the invention can comprise from 2 to about 10 monomer domains, from 2 and about 8 monomer domains, from about 3 and about 10 monomer domains, about 7 monomer domains, about 6 monomer domains, about 5 monomer domains, or about 4 monomer domains. In some embodiments, the multimer comprises 3 or at least 3 monomer domains. In some embodiments, the multimers have no more than 2, 3, 4, 5, 6, 7, or 8 monomer domains. In view of the possible range of monomer domain sizes, the multimers of the invention may be, e.g., less than 100 kD, less than 90 kD, less than 80 kD, less than 70 kD, less than 60 kD, less than 50 kD, less than 40 kD, less than 30 kD, less than 25 kD, less than 20 kD, less than 15 kD, less than 10 kD or may be smaller or larger. In some cases, the monomer domains have been pre-selected for binding to the target molecule of interest (e.g., Met).

[0144] In some embodiments, each monomer domain specifically binds to one target molecule (e.g., Met). In some of these embodiments, each monomer binds to a different position (analogous to an epitope) on a target molecule. Multiple monomer domains that bind to the same target molecule results in an avidity effect resulting in improved avidity of the multimer for the target molecule compared to each individual monomer. In some embodiments, the multimer has an avidity of at least about 1.5, 2, 3, 4, 5, 10, 20, 50 or 100 times the avidity of a monomer domain alone. In some embodiments, at least one, two, three, four or more (e.g., all) monomers of a multimer bind an ion such as calcium or another ion. Multimers can comprise a variety of combinations of monomer domains. For example, in a single multimer, the selected monomer domains can be identical or different. In addition, the selected monomer domains can comprise various different monomer domains from the same monomer domain family, or various monomer domains from different domain families, or optionally, a combination of both.

[0145] Multimers that are generated in the practice of the present invention may be any of the following:
[0146] (1) A homo-multimer (a multimer of the same domain, i.e., A1-A1-A1-A1);
[0147] (2) A hetero-multimer of different domains of the same domain class, e.g., A1-A2-A3-A4. For example, hetero-multimer include multimers where A1, A2, A3 and A4 are different non-naturally occurring variants of a particular LDL-receptor class A domains, or where some of A1,A2, A3, and A4 are naturally-occurring variants of a LDL-receptor class A domain (see, e.g., FIG. 10).
[0148] (3) A hetero-multimer of domains from different monomer domain classes, e.g., A1-B2-A2-B1. For example, where A1 and A2 are two different monomer domains (either naturally occurring or non-naturally-occurring) from LDL-receptor class A, and B1 and B2 are two different monomer domains (either naturally occurring or non-naturally occurring) from class EGF-like domain).

[0149] In another embodiment, the multimer comprises monomer domains with specificities for different target molecules. For example, in some embodiments, the multimers of the invention comprises 1, 2, 3, or more monomer domains that bind to Met and at least one monomer domain that binds to a second target molecule. Exemplary target molecules include, e.g., a serum molecule that extends the serum half-life of the multimer, EGFR gene family members, VEGF receptors, PDGF receptor, other receptor tyrosine kinases, integrins, other molecules implicated in tumorigenesis, or markers of tumor tissue. Exemplary molecule that extends the serum half-life of a multimer include, e.g., red blood cells, IgG, and serum albumin such as HSA.

[0150] Multimer libraries employed in the practice of the present invention may contain homo-multimers, hetero-multimers of different monomer domains (natural or non-natural) of the same monomer class, or hetero-multimers of monomer domains (natural or non-natural) from different monomer classes, or combinations thereof.

[0151] Monomer domains, as described herein, are also readily employed in a immuno-domain-containing heteromultimer (i.e., a multimer that has at least one immuno-domain variant and one monomer domain variant). Thus, multimers of the present invention may have at least one immuno-domain such as a minibody, a single-domain antibody, a single chain variable fragment (ScFv), or a Fab fragment; and at least one monomer domain, such as, for example, an EGF-like domain, a Kringle-domain, a fibronectin type I domain, a fibronectin type II domain, a fibronectin type III domain, a PAN domain, a Gla domain, a SRCR domain, a Kunitz/Bovine pancreatic trypsin Inhibitor domain, a Kazal-type serine protease inhibitor domain, a Trefoil (P-type) domain, a von Willebrand factor type C domain, an Anaphylatoxin-like domain, a CUB domain, a thyroglobulin type I repeat, LDL-receptor class A domain, a Sushi domain, a Link domain, a Thrombospondin type I domain, an Immunoglobulin-like domain, a C-type lectin domain, a MAM domain, a von Willebrand factor type A domain, a Somatomedin B domain, a WAP-type four disulfide core domain, a F5/8 type C domain, a Hemopexin domain, an SH2 domain, an SH3 domain, a Laminin-type EGF-like domain, a C2 domain, or variants thereof.

[0152] Domains need not be selected before the domains are linked to form multimers. On the other hand, the domains can be selected for the ability to bind to a target molecule before being linked into multimers. Thus, for example, a multimer can comprise two domains that bind to one target molecule and a third domain that binds to a second target molecule.

[0153] The multimers of the present invention may have the following qualities: multivalent, multispecific, single chain, heat stable, extended serum and/or shelf half-life. Moreover, at least one, more than one or all of the monomer domains may bind an ion (e.g., a metal ion or a calcium ion), at least one, more than one or all monomer domains may be derived from LDL receptor A domains and/or EGF-like domains, at least one, more than one or all of the monomer domains may be non-naturally occurring, and/or at least one, more than one or all of the monomer domains may comprise 1, 2, 3, or 4 disulfide bonds per monomer domain. In some embodiments, the multimers comprise at least two (or at least three) monomer domains, wherein at least one monomer domain is a non-naturally occurring monomer domain and the monomer domains bind calcium. In some embodiments, the multimers comprise at least 4 monomer domains, wherein at least one monomer domain is non-naturally occurring, and wherein:
[0154] a. each monomer domain is between 30-100 amino acids and each of the monomer domains comprise at least one disulfide linkage; or
[0155] b. each monomer domain is between 30-100 amino acids and is derived from an extracellular protein; or
[0156] c. each monomer domain is between 30-100 amino acids and binds to a protein target.

[0157] In some embodiments, the multimers comprise at least 4 monomer domains, wherein at least one monomer domain is non-naturally occurring, and wherein:
[0158] a. each monomer domain is between 35-100 amino acids; or
[0159] b. each domain comprises at least one disulfide bond and is derived from a human protein and/or an extracellular protein.

[0160] In some embodiments, the multimers comprise at least two monomer domains, wherein at least one monomer domain is non-naturally occurring, and wherein each domain is:
[0161] a. 25-50 amino acids long and comprises at least one disulfide bond; or
[0162] b. 25-50 amino acids long and is derived from an extracellular protein; or
[0163] c. 25-50 amino acids and binds to a protein target; or
[0164] d. 35-50 amino acids long.

[0165] In some embodiments, the multimers comprise at least two monomer domains, wherein at least one monomer domain is non-naturally-occurring and:
[0166] a. each monomer domain comprises at least one disulfide bond; or
[0167] b. at least one monomer domain is derived from an extracellular protein; or
[0168] c. at least one monomer domain binds to a target protein.

[0169] A significant advantage of the present invention is that known ligands, or unknown ligands can be used to select the monomer domains and/or multimers. No prior information regarding ligand structure is required to isolate the monomer domains of interest or the multimers of interest. The monomer domains and/or multimers identified can have biological activity, which is meant to include at least specific binding affinity for a selected or desired ligand, and, in some instances, will further include the ability to block the binding of other compounds, to stimulate or inhibit metabolic pathways, to act as a signal or messenger, to stimulate or inhibit cellular activity, and the like. Monomer domains can be generated to function as ligands for receptors where the natural ligand for the receptor has not yet been identified (orphan receptors). These orphan ligands can be created to either block or activate the receptor top which they bind.

[0170] A single ligand can be used, or optionally a variety of ligands can be used to select the monomer domains and/or multimers. A monomer domain of the present invention can bind a single ligand or a variety of ligands. A multimer of the present invention can have multiple discrete binding sites for a single ligand, or optionally, can have multiple binding sites for a variety of ligands.

[0171] In some embodiments, the multimer comprises monomer domains with specificities for different proteins. The different proteins can be related or unrelated. Examples of related proteins including members of a protein family or different serotypes of a virus. Alternatively, the monomer domains of a multimer can target different molecules in a physiological pathway (e.g., different blood coagulation proteins). In yet other embodiments, monomer domains bind to proteins in unrelated pathways (e.g., two domains bind to blood factors, two other domains bind to inflammation-related proteins and a fifth binds to serum albumin). In another embodiment, a multimer is comprised of monomer domains that bind to different pathogens or contaminants of interest. Such multimers are useful as a single detection agent capable of detecting for the possibility of any of a number of pathogens or contaminants.

[0172] In some embodiments, the multimers of the invention bind to the same or other multimers to form aggregates. Aggregation can be mediated, for example, by the presence of hydrophobic domains on two monomer domains, resulting in the formation of non-covalent interactions between two monomer domains. Alternatively, aggregation may be facilitated by one or more monomer domains in a multimer having binding specificity for a monomer domain in another multimer. Aggregates can also form due to the presence of affinity peptides on the monomer domains or multimers. Aggregates can contain more target molecule binding domains than a single multimer.

[0173] Multimers with affinity for both a cell surface target and a second target may provide for increased avidity effects. In some cases, membrane fluidity can be more flexible than protein linkers in optimizing (by self-assembly) the spacing and valency of the interactions. In some cases, multimers will bind to two different targets, each on a different cell or one on a cell and another on a molecule with multiple binding sites. See. e.g., FIGS. 16 and 17.

[0174] In some embodiments, the monomers or multimers of the present invention are linked to another polypeptide to form a fusion protein. Any polypeptide in the art may be used as a fusion partner, though it can be useful if the fusion partner forms multimers. For example, monomers or multimers of the invention may, for example, be fused to the following locations or combinations of locations of an antibody:
[0175] 1. At the N-terminus of the VH1 and/or VL1 domains, optionally just after the leader peptide and before the domain starts (framework region 1);
[0176] 2. At the N-terminus of the CH1 or CL1 domain, replacing the VH1 or VL1 domain;
[0177] 3. At the N-terminus of the heavy chain, optionally after the CH1 domain and before the cysteine residues in the hinge (Fc-fusion);
[0178] 4. At the N-terminus of the CH3 domain;
[0179] 5. At the C-terminus of the CH3 domain, optionally attached to the last amino acid residue via a short linker;
[0180] 6. At the C-terminus of the CH2 domain, replacing the CH3 domain;
[0181] 7. At the C-terminus of the CL1 or CH1 domain, optionally after the cysteine that forms the interchain disulfide; or
[0182] 8. At the C-terminus of the VH1 or VL1 domain. See, e.g., FIG. 18.

[0183] In some embodiments, the monomer or multimer domain is linked to a molecule (e.g., a protein, nucleic acid, organic small molecule, etc.) useful as a pharmaceutical. Exemplary pharmaceutical proteins include, e.g., cytokines, antibodies, chemokines, growth factors, interleukins, cell-surface proteins, extracellular domains, cell surface receptors, cytotoxins, etc. Exemplary small molecule pharmaceuticals include small molecule toxins or therapeutic agents.

[0184] In some embodiments, the monomer or multimers are selected to bind to a tissue- or disease-specific target protein. Tissue-specific proteins are proteins that are expressed exclusively, or at a significantly higher level, in one or several particular tissue(s) compared to other tissues in an animal. As c-Met is expressed at significant levels in the liver, monomer domains that bind to Met may be used to target other molecules, including other monomer domains, to the liver. This may be used to target liver-specific diseases, for example, by targeting therapeutic or toxic molecules to the liver. An example of a liver disease that can be treated is hepatocellular carcinoma. Similarly, disease-specific proteins are proteins that are expressed exclusively, or at a significantly higher level, in one or several diseased cells or tissues compared to other non-diseased cells or tissues in an animal.

[0185] In some embodiments, the monomers or multimers that bind to the target protein are linked to the pharmaceutical protein or small molecule such that the resulting complex or fusion is targeted to the specific tissue or disease-related cell(s) where the target protein (e.g., Met) is expressed. Monomers or multimers for use in such complexes or fusions can be initially selected for binding to the target protein and may be subsequently selected by negative selection against other cells or tissue (e.g., to avoid targeting bone marrow or other tissues that set the lower limit of drug toxicity) where it is desired that binding be reduced or eliminated in other non-target cells or tissues. By keeping the pharmaceutical away from sensitive tissues, the therapeutic window is increased so that a higher dose may be administered safely. In another alternative, in vivo panning can be performed in animals by injecting a library of monomers or multimers into an animal and then isolating the monomers or multimers that bind to a particular tissue or cell of interest.

[0186] The fusion proteins described above may also include a linker peptide between the pharmaceutical protein and the monomer or multimers. A peptide linker sequence may be employed to separate, for example, the polypeptide components by a distance sufficient to ensure that each polypeptide folds into its secondary and tertiary structures. Fusion proteins may generally be prepared using standard techniques, including chemical conjugation. Fusion proteins can also be expressed as recombinant proteins in an expression system by standard techniques.

[0187] Multimers or monomer domains of the invention can be produced according to any methods known in the art. In some embodiments, E. coli comprising a pET-derived plasmid encoding the polypeptides are induced to express the protein. After harvesting the bacteria, they may be lysed and clarified by centrifugation. The polypeptides may be purified using Ni—NTA agarose elution and refolded by dialysis. Misfolded proteins may be neutralized by capping free sulfhydrils with iodoacetic acid. Q sepharose elution, butyl sepharose FT, SP sepharose elution, Q sepharose elution, and/or SP sepharose elution may be used to purify the polypeptides.

IV. Linkers

[0188] Monomer domains can be joined by a linker to form a multimer. For example, a linker may be positioned between each separate discrete monomer domain in a multimer.

[0189] Joining the selected monomer domains via a linker can be accomplished using a variety of techniques known in the art. For example, combinatorial assembly of polynucleotides encoding selected monomer domains can be achieved by restriction digestion and re-ligation, by PCR-based, self-priming overlap reactions, or other recombinant methods. The linker can be attached to a monomer before the monomer is identified for its ability to bind to a target multimer or after the monomer has been selected for the ability to bind to a target multimer.

[0190] The linker can be naturally-occurring, synthetic or a combination of both. For example, the synthetic linker can be a randomized linker, e.g., both in sequence and size. In one aspect, the randomized linker can comprise a fully randomized sequence, or optionally, the randomized linker can be based on natural linker sequences. The linker can comprise, e.g,. a non-polypeptide moiety, a polynucleotide, a polypeptide or the like.

[0191] A linker can be rigid, or flexible, or a combination of both. Linker flexibility can be a function of the composition of both the linker and the monomer domains that the linker interacts with. The linker joins two selected monomer domain, and maintains the monomer domains as separate discrete monomer domains. The linker can allow the separate discrete monomer domains to cooperate yet maintain separate properties such as multiple separate binding sites for the same ligand in a multimer, or e.g., multiple separate binding sites for different ligands in a multimer.

[0192] Choosing a suitable linker for a specific case where two or more monomer domains (i.e. polypeptide chains) are to be connected may depend on a variety of parameters including, e.g. the nature of the monomer domains, the structure and nature of the target to which the polypeptide multimer should bind and/or the stability of the peptide linker towards proteolysis and oxidation.

[0193] The present invention provides methods for optimizing the choice of linker once the desired monomer domains/variants have been identified. Generally, libraries of multimers having a composition that is fixed with regard to monomer domain composition, but variable in linker composition and length, can be readily prepared and screened as described above.

[0194] Typically, the linker polypeptide may predominantly include amino acid residues selected from the group consisting of Gly, Ser, Ala and Thr. For example, the peptide linker may contain at least 75% (calculated on the basis of the total number of residues present in the peptide linker), such as at least 80%, e.g. at least 85% or at least 90% of amino acid residues selected from the group consisting of Gly, Ser, Ala and Thr. The peptide linker may also consist of Gly, Ser, Ala and/or Thr residues only. The linker polypeptide should have a length, which is adequate to link two monomer domains in such a way that they assume the correct conformation relative to one another so that they retain the desired activity, for example as antagonists of a given receptor.

[0195] A suitable length for this purpose is a length of at least one and typically fewer than about 50 amino acid residues, such as 2-25 amino acid residues, 5-20 amino acid residues, 5-15 amino acid residues, 8-12 amino acid residues or 11 residues. Similarly, the polypeptide encoding a linker can range in size, e.g., from about 2 to about 15 amino acids, from about 3 to about 15, from about 4 to about 12, about 10, about 8, or about 6 amino acids. In methods and compositions involving nucleic acids, such as DNA, RNA, or combinations of both, the polynucleotide containing the linker sequence can be, e.g., between about 6 nucleotides and about 45 nucleotides, between about 9 nucleotides and about 45 nucleotides, between about 12 nucleotides and about 36 nucleotides, about 30 nucleotides, about 24 nucleotides, or about 18 nucleotides. Likewise, the amino acid residues selected for inclusion in the linker polypeptide should exhibit properties that do not interfere significantly with the activity or function of the polypeptide multimer. Thus, the peptide linker should on the whole not exhibit a charge which would be inconsistent with the activity or function of the polypeptide multimer, or interfere with internal folding, or form bonds or other interactions with amino acid residues in one or more of the monomer domains which would seriously impede the binding of the polypeptide multimer to the target in question.

[0196] In another embodiment of the invention, the peptide linker is selected from a library where the amino acid residues in the peptide linker are randomized for a specific set of monomer domains in a particular polypeptide multimer. A flexible linker could be used to find suitable combinations of monomer domains, which is then optimized using this random library of variable linkers to obtain linkers with optimal length and geometry. The optimal linkers may contain the minimal number of amino acid residues of the right type that participate in the binding to the target and restrict the movement of the monomer domains relative to each other in the polypeptide multimer when not bound to the target.

[0197] The use of naturally occurring as well as artificial peptide linkers to connect polypeptides into novel linked fusion polypeptides is well known in the literature (Hallewell et al. (1989), J. Biol. Chem. 264, 5260-5268; Alfthan et al. (1995), Protein Eng. 8, 725-731; Robinson & Sauer (1996), Biochemistry 35, 109-116; Khandekar et al. (1997), J. Biol. Chem. 272, 32190-32197; Fares et al. (1998), Endocrinology 139, 2459-2464; Smallshaw et al. (1999), Protein Eng. 12, 623-630; U.S. Pat. No. 5,856,456).

[0198] One example where the use of peptide linkers is widespread is for production of single-chain antibodies where the variable regions of a light chain (V_{L}) and a heavy chain (V_{H}) are joined through an artificial linker, and a large number of publications exist within this particular field. A widely used peptide linker is a 15mer consisting of three repeats of a Gly-Gly-Gly-Gly-Ser (SEQ ID NO: 240) amino acid sequence ((Gly₄Ser)₃). Other linkers have been used, and phage display technology, as well as, selective infective phage technology has been used to diversify and select appropriate linker sequences (Tang et al. (1996), J. Biol. Chem. 271, 15682-15686; Hennecke et al. (1998), Protein Eng. 11, 405-410). Peptide linkers have been used to connect individual chains in hetero- and homo-dimeric proteins such as the T-cell receptor, the lambda Cro repressor, the P22 phage Arc repressor, IL-12, TSH, FSH, 1L-5, and interferon-γ. Peptide linkers have also been used to create fusion polypeptides. Various linkers have been used and in the case of the Arc repressor phage display has been used to optimize the linker length and composition for increased stability of the single-chain protein (Robinson and Sauer (1998), Proc. Natl. Acad. Sci. USA 95, 5929-5934).

[0199] Another type of linker is an intein, i.e. a peptide stretch which is expressed with the single-chain polypeptide, but removed post-translationally by protein splicing. The use of inteins is reviewed by F. S. Gimble in Chemistry and Biology, 1998, Vol 5, No. 10 pp. 251-256.

[0200] Still another way of obtaining a suitable linker is by optimizing a simple linker, e.g. (Gly₄Ser)ₙ, (SEQ ID NO: 240), through random mutagenesis.

[0201] As mentioned above, it is generally preferred that the peptide linker possess at least some flexibility. Accordingly, in some embodiments, the peptide linker contains 1-25 glycine residues, 5-20 glycine residues, 5-15 glycine residues or 8-12 glycine residues. The peptide linker will typically contain at least 50% glycine residues, such as at least 75% glycine residues. In some embodiments of the invention, the peptide linker comprises glycine residues only.

[0202] The peptide linker may, in addition to the glycine residues, comprise other residues, in particular residues selected from the group consisting of Ser, Ala and Thr, in particular Ser. Thus, one example of a specific peptide linker includes a peptide linker having the amino acid sequence Glyₓ-Xaa-Gly_{y}-Xaa-Gly_{z} (SEQ ID NO: 203), wherein each Xaa is independently selected from the group consisting Ala, Val, Leu, Ile, Met, Phe, Trp, Pro, Gly, Ser, Thr, Cys, Tyr, Asn, Gln, Lys, Arg, His, Asp and Glu, and wherein x, y and z are each integers in the range from 1-5. In some embodiments, each Xaa is independently selected from the group consisting of Ser, Ala and Thr, in particular Ser. More particularly, the peptide linker has the amino acid sequence Gly-Gly-Gly-Xaa-Gly-Gly-Gly-Xaa-Gly-Gly-Gly (SEQ ID NO: 204), wherein each Xaa is independently selected from the group consisting Ala, Val, Leu, Ile, Met, Phe, Trp, Pro, Gly, Ser, Thr, Cys, Tyr, Asn, Gln, Lys, Arg, His, Asp and Glu. In some embodiments, each Xaa is independently selected from the group consisting of Ser, Ala and Thr, in particular Ser.

[0203] In some cases it may be desirable or necessary to provide some rigidity into the peptide linker. This may be accomplished by including proline residues in the amino acid sequence of the peptide linker. Thus, in another embodiment of the invention, the peptide linker comprises at least one proline residue in the amino acid sequence of the peptide linker. For example, the peptide linker has an amino acid sequence, wherein at least 25%, such as at least 50%, e.g. at least 75%, of the amino acid residues are proline residues. In one particular embodiment of the invention, the peptide linker comprises proline residues only.

[0204] In some embodiments of the invention, the peptide linker is modified in such a way that an amino acid residue comprising an attachment group for a non-polypeptide moiety is introduced. Examples of such amino acid residues may be a cysteine residue (to which the non-polypeptide moiety is then subsequently attached) or the amino acid sequence may include an in vivo N-glycosylation site (thereby attaching a sugar moiety (in vivo) to the peptide linker).

[0205] In some embodiments of the invention, the peptide linker comprises at least one cysteine residue, such as one cysteine residue. Thus, in some embodiments of the invention the peptide linker comprises amino acid residues selected from the group consisting of Gly, Ser, Ala, Thr and Cys. In some embodiments, such a peptide linker comprises one cysteine residue only.

[0206] In a further embodiment, the peptide linker comprises glycine residues and cysteine residue, such as glycine residues and cysteine residues only. Typically, only one cysteine residue will be included per peptide linker. Thus, one example of a specific peptide linker comprising a cysteine residue, includes a peptide linker having the amino acid sequence Glyₙ-Cys-Glyₘ (SEQ ID NO: 205), wherein n and m are each integers from 1-12, e.g., from 3-9, from 4-8, or from 4-7. More particularly, the peptide linker may have the amino acid sequence GGGGG-C-GGGGG (SEQ ID NO: 206).

[0207] This approach (i.e. introduction of an amino acid residue comprising an attachment group for a non-polypeptide moiety) may also be used for the more rigid proline-containing linkers. Accordingly, the peptide linker may comprise proline and cysteine residues, such as proline and cysteine residues only. An example of a specific proline-containing peptide linker comprising a cysteine residue, includes a peptide linker having the amino acid sequence Proₙ-Cys-Proₘ (SEQ ID NO: 207), wherein n and m are each integers from 1-12, preferably from 3-9, such as from 4-8 or from 4-7. More particularly, the peptide linker may have the amino acid sequence PPPPP—C—PPPPP (SEQ ID NO: 208).

[0208] In some embodiments, the purpose of introducing an amino acid residue, such as a cysteine residue, comprising an attachment group for a non-polypeptide moiety is to subsequently attach a non-polypeptide moiety to said residue. For example, non-polypeptide moieties can improve the serum half-life of the polypeptide multimer. Thus, the cysteine residue can be covalently attached to a non-polypeptide moiety. Preferred examples of non-polypeptide moieties include polymer molecules, such as PEG or mPEG, in particular mPEG as well as non-polypeptide therapeutic agents.

[0209] The skilled person will acknowledge that amino acid residues other than cysteine may be used for attaching a non-polypeptide to the peptide linker. One particular example of such other residue includes coupling the non-polypeptide moiety to a lysine residue.

[0210] Another possibility of introducing a site-specific attachment group for a non-polypeptide moiety in the peptide linker is to introduce an in vivo N-glycosylation site, such as one in vivo N-glycosylation site, in the peptide linker. For example, an in vivo N-glycosylation site may be introduced in a peptide linker comprising amino acid residues selected from the group consisting of Gly, Ser, Ala and Thr. It will be understood that in order to ensure that a sugar moiety is in fact attached to said in vivo N-glycosylation site, the nucleotide sequence encoding the polypeptide multimer must be inserted in a glycosylating, eukaryotic expression host.

[0211] A specific example of a peptide linker comprising an in vivo N-glycosylation site is a peptide linker having the amino acid sequence Glyₙ-Asn-Xaa-Ser/Thr-Glyₘ (SEQ ID NO: 209), preferably Glyₙ-Asn-Xaa-Thr-Glyₘ (SEQ ID NO: 210), wherein Xaa is any amino acid residue except proline, and wherein n and m are each integers in the range from 1-8, preferably in the range from 2-5.

[0212] Often, the amino acid sequences of all peptide linkers present in the polypeptide multimer will be identical. Nevertheless, in certain embodiments the amino acid sequences of all peptide linkers present in the polypeptide multimer may be different. The latter is believed to be particular relevant in case the polypeptide multimer is a polypeptide tri-mer or tetra-mer and particularly in such cases where an amino acid residue comprising an attachment group for a non-polypeptide moiety is included in the peptide linker.

[0213] Quite often, it will be desirable or necessary to attach only a few, typically only one, non-polypeptide moieties/moiety (such as mPEG, a sugar moiety or a non-polypeptide therapeutic agent) to the polypeptide multimer in order to achieve the desired effect, such as prolonged serum-half life. Evidently, in case of a polypeptide tri-mer, which will contain two peptide linkers, only one peptide linker is typically required to be modified, e.g. by introduction of a cysteine residue, whereas modification of the other peptide linker will typically not be necessary not. In this case all (both) peptide linkers of the polypeptide multimer (tri-mer) are different.

[0214] Accordingly, in a further embodiment of the invention, the amino acid sequences of all peptide linkers present in the polypeptide multimer are identical except for one, two or three peptide linkers, such as except for one or two peptide linkers, in particular except for one peptide linker, which has/have an amino acid sequence comprising an amino acid residue comprising an attachment group for a non-polypeptide moiety. Preferred examples of such amino acid residues include cysteine residues of in vivo N-glycosylation sites.

[0215] A linker can be a native or synthetic linker sequence. An exemplary native linker includes, e.g., the sequence between the last cysteine of a first LDL receptor A domain and the first cysteine of a second LDL receptor A domain can be used as a linker sequence. Analysis of various A domain linkages reveals that native linkers range from at least 3 amino acids to fewer than 20 amino acids, e.g., 4, 5, 6, 7, 8, 9, 10, 11, 12, 13, 14, 15, 16, 17, or 18 amino acids long. However, those of skill in the art will recognize that longer or shorter linker sequences can be used. An exemplary A domain linker sequence is depicted in FIG. 8. In some embodiments, the linker is a 6-mer of the following sequence A₁A₂A₃A₄A₅A₆ (SEQ ID NO: 244), wherein A1 is selected from the amino acids A, P, T, Q, E and K; A₂ and A₃ are any amino acid except C, F, Y, W, or M; A₄ is selected from the amino acids S, G and R; A₅ is selected from the amino acids H, P, and R; and A₆ is the amino acid, T.

[0216] Methods for generating multimers from monomer domains can include joining the selected domains with at least one linker to generate at least one multimer, e.g., the multimer can comprise at least two of the monomer domains and the linker. The multimer(s) is then screened for an improved avidity or affinity or altered specificity for the desired ligand or mixture of ligands as compared to the selected monomer domains. A composition of the multimer produced by the method is included in the present invention.

[0217] In other methods, the selected multimer domains are joined with at least one linker to generate at least two multimers, wherein the two multimers comprise two or more of the selected monomer domains and the linker. The two or more multimers are screened for an improved avidity or affinity or altered specificity for the desired ligand or mixture of ligands as compared to the selected monomer domains. Compositions of two or more multimers produced by the above method are also features of the invention.

[0218] Typically, multimers of the present invention are a single discrete polypeptide. Multimers of partial linker-domain-partial linker moieties are an association of multiple polypeptides, each corresponding to a partial linker-domain-partial linker moiety.

[0219] Suitable linkers employed in the practice of the present invention include an obligate heterodimer of partial linker moieties. The term “obligate heterodimer” (also referred to as “affinity peptides”) refers herein to a dimer of two partial linker moieties that differ from each other in composition, and which associate with each other in a non-covalent, specific manner to join two domains together. The specific association is such that the two partial linkers associate substantially with each other as compared to associating with other partial linkers. Thus, in contrast to multimers of the present invention that are expressed as a single polypeptide, multimers of domains that are linked together via heterodimers are assembled from discrete partial linker-monomer-partial linker units. Assembly of the heterodimers can be achieved by, for example, mixing. Thus, if the partial linkers are polypeptide segments, each partial linker-monomer-partial linker unit may be expressed as a discrete peptide prior to multimer assembly. A disulfide bond can be added to covalently lock the peptides together following the correct non-covalent pairing. A multimer containing such obligate heterodimers is depicted in FIG. 11. Partial linker moieties that are appropriate for forming obligate heterodimers include, for example, polynucleotides, polypeptides, and the like. For example, when the partial linker is a polypeptide, binding domains are produced individually along with their unique linking peptide (i.e., a partial linker) and later combined to form multimers. The spatial order of the binding domains in the multimer is thus mandated by the heterodimeric binding specificity of each partial linker. Partial linkers can contain terminal amino acid sequences that specifically bind to a defined heterologous amino acid sequence. An example of such an amino acid sequence is the Hydra neuropeptide head activator as described in Bodenmuller et al., The neuropeptide head activator loses its biological activity by dimerization, (1986) EMBO J. 5(8):1825-1829. See, e.g., U.S. Pat. No. 5,491,074 and WO 94/28173. These partial linkers allow the multimer to be produced first as monomer-partial linker units or partial linker-monomer-partial linker units that are then mixed together and allowed to assemble into the ideal order based on the binding specificities of each partial linker. Alternatively, monomers linked to partial linkers can be contacted to a surface, such as a cell, in which multiple monomers can associate to form higher avidity complexes via partial linkers. In some cases, the association will form via random Brownian motion.

[0220] When the partial linker comprises a DNA binding motif, each monomer domain has an upstream and a downstream partial linker (i.e., Lp-domain-Lp, where “Lp” is a representation of a partial linker) that contains a DNA binding protein with exclusively unique DNA binding specificity. These domains can be produced individually and then assembled into a specific multimer by the mixing of the domains with DNA fragments containing the proper nucleotide sequences (i.e., the specific recognition sites for the DNA binding proteins of the partial linkers of the two desired domains) so as to join the domains in the desired order. Additionally, the same domains may be assembled into many different multimers by the addition of DNA sequences containing various combinations of DNA binding protein recognition sites. Further randomization of the combinations of DNA binding protein recognition sites in the DNA fragments can allow the assembly of libraries of multimers. The DNA can be synthesized with backbone analogs to prevent degradation in vivo.

[0221] Suitable linkers employed in the practice of the present invention include an obligate heterodimer of partial linker moieties. The term “obligate heterodimer” (also referred to as “affinity peptides”) refers herein to a dimer of two partial linker moieties that differ from each other in composition, and which associate with each other in a non-covalent, specific manner to join two domains together. The specific association is such that the two partial linkers associate substantially with each other as compared to associating with other partial linkers. Thus, in contrast to multimers of the present invention that are expressed as a single polypeptide, multimers of domains that are linked together via heterodimers are assembled from discrete partial linker-monomer-partial linker units. Assembly of the heterodimers can be achieved by, for example, mixing. Thus, if the partial linkers are polypeptide segments, each partial linker-monomer-partial linker unit may be expressed as a discrete peptide prior to multimer assembly. A disulfide bond can be added to covalently lock the peptides together following the correct non-covalent pairing. A multimer containing such obligate heterodimers is depicted in FIG. 11. Partial linker moieties that are appropriate for forming obligate heterodimers include, for example, polynucleotides, polypeptides, and the like. For example, when the partial linker is a polypeptide, binding domains are produced individually along with their unique linking peptide (i.e., a partial linker) and later combined to form multimers. See, e.g., Madden, M., Aldwin, L., Gallop, M. A., and Stemmer, W. P. C. (1993) Peptide linkers: Unique self-associative high-affinity peptide linkers. Thirteenth American Peptide Symposium, Edmonton, Canada (abstract). The spatial order of the binding domains in the multimer is thus mandated by the heterodimeric binding specificity of each partial linker. Partial linkers can contain terminal amino acid sequences that specifically bind to a defined heterologous amino acid sequence. An example of such an amino acid sequence is the Hydra neuropeptide head activator as described in Bodenmuller et al., The neuropeptide head activator loses its biological activity by dimerization, (1986) EMBO J. 5(8):1825-1829. See, e.g., U.S. Pat. No. 5,491,074 and WO 94/28173. These partial linkers allow the multimer to be produced first as monomer-partial linker units or partial linker-monomer-partial linker units that are then mixed together and allowed to assemble into the ideal order based on the binding specificities of each partial linker. Alternatively, monomers linked to partial linkers can be contacted to a surface, such as a cell, in which multiple monomers can associate to form higher avidity complexes via partial linkers. In some cases, the association will form via random Brownian motion.

[0222] When the partial linker comprises a DNA binding motif, each monomer domain has an upstream and a downstream partial linker (i.e., Lp-domain-Lp, where “Lp” is a representation of a partial linker) that contains a DNA binding protein with exclusively unique DNA binding specificity. These domains can be produced individually and then assembled into a specific multimer by the mixing of the domains with DNA fragments containing the proper nucleotide sequences (i.e., the specific recognition sites for the DNA binding proteins of the partial linkers of the two desired domains) so as to join the domains in the desired order. Additionally, the same domains may be assembled into many different multimers by the addition of DNA sequences containing various combinations of DNA binding protein recognition sites. Further randomization of the combinations of DNA binding protein recognition sites in the DNA fragments can allow the assembly of libraries of multimers. The DNA can be synthesized with backbone analogs to prevent degradation in vivo.

V. Identifying Monomers or Multimers With Affinity For a Target Molecule

[0223] Those of skill in the art can readily identify monomer domains with a desired property (e.g., binding affinity). For those embodiments, any method resulting in selection of domains with a desired property (e.g., a specific binding property) can be used. For example, the methods can comprise providing a plurality of different nucleic acids, each nucleic acid encoding a monomer domain; translating the plurality of different nucleic acids, thereby providing a plurality of different monomer domains; screening the plurality of different monomer domains for binding of the desired ligand or a mixture of ligands; and, identifying members of the plurality of different monomer domains that bind the desired ligand or mixture of ligands.

[0224] In addition, any method of mutagenesis, such as site-directed mutagenesis and random mutagenesis (e.g., chemical mutagenesis) can be used to produce monomer domains, e.g., for a monomer domain library. In some embodiments, error-prone PCR is employed to create variants. Additional methods include aligning a plurality of naturally occurring monomer domains by aligning conserved amino acids in the plurality of naturally occurring monomer domains; and, designing the non-naturally occurring monomer domain by maintaining the conserved amino acids and inserting, deleting or altering amino acids around the conserved amino acids to generate the non-naturally occurring monomer domain. In one embodiment, the conserved amino acids comprise cysteines. In another embodiment, the inserting step uses random amino acids, or optionally, the inserting step uses portions of the naturally occurring monomer domains. The portions could ideally encode loops from domains from the same family. Amino acids are inserted or exchanged using synthetic oligonucleotides, or by shuffling, or by restriction enzyme based recombination. Human chimeric domains of the present invention are useful for therapeutic applications where minimal immunogenicity is desired. The present invention provides methods for generating libraries of human chimeric domains. Human chimeric monomer domain libraries can be constructed by combining loop sequences from different variants of a human monomer domain, as described above. The loop sequences that are combined may be sequence-defined loops, structure-defined loops, B-factor-defined loops, or a combination of any two or more thereof.

[0225] Alternatively, a human chimeric domain library can be generated by modifying naturally-occurring human monomer domains at the amino acid level, as compared to the loop level. In some embodiments, to minimize the potential for immunogenicity, only those residues that naturally occur in protein sequences from the same family of human monomer domains are utilized to create the chimeric sequences. This can be achieved by providing a sequence alignment of at least two human monomer domains from the same family of monomer domains, identifying amino acid residues in corresponding positions in the human monomer domain sequences that differ between the human monomer domains, generating two or more human chimeric monomer domains, wherein each human chimeric monomer domain sequence consists of amino acid residues that correspond in type and position to residues from two or more human monomer domains from the same family of monomer domains. Libraries of human chimeric monomer domains can be employed to identify human chimeric monomer domains that bind to a target of interest by: screening the library of human chimeric monomer domains for binding to a target molecule, and identifying a human chimeric monomer domain that binds to the target molecule. Suitable naturally-occurring human monomer domain sequences employed in the initial sequence alignment step include those corresponding to any of the naturally-occurring monomer domains described herein.

[0226] Domains of human monomer variant libraries of the present invention (whether generated by varying loops or single amino acid residues) can be prepared by methods known to those having ordinary skill in the art. Methods particularly suitable for generating these libraries are split-pool format and trinucleotide synthesis format as described in WO01/23401.

[0227] In some embodiments, monomer domains of the invention are screened for potential immunogenicity by:
[0228] providing a candidate protein sequence;
[0229] comparing the candidate protein sequence to a database of human protein sequences;
[0230] identifying portions of the candidate protein sequence that correspond to portions of human protein sequences from the database; and
[0231] determining the extent of correspondence between the candidate protein sequence and the human protein sequences from the database.

[0232] In general, the greater the extent of correspondence between the candidate protein sequence and one or more of the human protein sequences from the database, the lower the potential for immunogenicity is predicted as compared to a candidate protein having little correspondence with any of the human protein sequences from the database. A database of human protein sequences that is suitable for use in the practice of the invention method for screening candidate proteins can be found at ncbi.nlm.nih.gov/blast/Blast.cgi at the World Wide Web (in addition, the following web site can be used to search short, nearly exact matches: cbi.nlm.nih.gov/blast/Blast.cgi?CMD=Web&LAYOUT=TwoWindows&AUTO_FORMAT=Semiauto&ALIGNMENTS=50&ALIGNMENT_VIEW=Pairwise&CLIENT=web&DATABASE=nr&DESCRIPTIONS=100&ENTREZ_QUERY=(none)&EXPECT=1000&FORMAT_OBJECT=Alignment&FORMAT_TYPE=HTML&NCBI_GI=on&PAGE=Nucleotides&PROGRAM=blastn&SERVICE=plain&SET_DEFAULTS.x=29&SET_DEFAULTS.y=6&SHOW_OVERVIEW=on&WORD_SIZE=7&END_OF_HTTPGET=Yes&SHOW_LINKOUT=yes at the World Wide Web). The method is particularly useful in determining whether a crossover sequence in a chimeric protein, such as, for example, a chimeric monomer domain, is likely to cause an immunogenic event. If the crossover sequence corresponds to a portion of a sequence found in the database of human protein sequences, it is believed that the crossover sequence is less likely to cause an immunogenic event. An example of the comparison step is depicted in FIG. 12, which shows a comparison of two candidate protein sequences to human sequences from a database. The horizontal lines indicate where the human protein sequences from the database are identical to the candidate protein sequence.

[0233] Information pertaining to portions of human protein sequences from the database can be used to design a protein library of human-like chimeric proteins. Such library can be generated by using information pertaining to “crossover sequences” that exist in naturally occurring human proteins. The term “crossover sequence” refers herein to a sequence that is found in its entirety in at least one naturally occurring human protein, in which portions of the sequence are found in two or more naturally occurring proteins. Thus, recombination of the latter two or more naturally occurring proteins would generate a chimeric protein in which the chimeric portion of the sequence actually corresponds to a sequence found in another naturally occurring protein. The crossover sequence contains a chimeric junction of two consecutive amino acid residue positions in which the first amino acid position is occupied by an amino acid residue identical in type and position found in a first and second naturally occurring human protein sequence, but not a third naturally occurring human protein sequence. The second amino acid position is occupied by an amino acid residue identical in type and position found in a second and third naturally occurring human protein sequence, but not the first naturally occurring human protein sequence. In other words, the “second” naturally occurring human protein sequence corresponds to the naturally occurring human protein in which the crossover sequence appears in its entirety, as described above.

[0234] In some embodiments, a library of human-like chimeric proteins is generated by: identifying human protein sequences from a database that correspond to proteins from the same family of proteins; aligning the human protein sequences from the same family of proteins to a reference protein sequence; identifying a set of subsequences derived from different human protein sequences of the same family, wherein each subsequence shares a region of identity with at least one other subsequence derived from a different naturally occurring human protein sequence; identifying a chimeric junction from a first, a second, and a third subsequence, wherein each subsequence is derived from a different naturally occurring human protein sequence, and wherein the chimeric junction comprises two consecutive amino acid residue positions in which the first amino acid position is occupied by an amino acid residue common to the first and second naturally occurring human protein sequence, but not the third naturally occurring human protein sequence, and the second amino acid position is occupied by an amino acid residue common to the second and third naturally occurring human protein sequence, and generating human-like chimeric protein molecules each corresponding in sequence to two or more subsequences from the set of subsequences, and each comprising one of more of the identified chimeric junctions.

[0235] Thus, for example, if the first naturally-occurring human protein sequence is, A-B-C, and the second is, B-C-D-E, and the third is, D-E-F, then the chimeric junction is C-D. Alternatively, if the first naturally-occurring human protein sequence is D-E-F-G, and the second is B-C-D-E-F, and the third is A-B-C-D, then the chimeric junction is D-E. Human-like chimeric protein molecules can be generated in a variety of ways. For example, oligonucleotides comprising sequences encoding the chimeric junctions can be recombined with oligonucleotides corresponding in sequence to two or more subsequences from the above-described set of subsequences to generate a human-like chimeric protein, and libraries thereof. The reference sequence used to align the naturally occurring human proteins is a sequence from the same family of naturally occurring human proteins, or a chimera or other variant of proteins in the family.

[0236] Nucleic acids encoding fragments of naturally-occurring monomer domains can also be mixed and/or recombined (e.g., by using chemically or enzymatically-produced fragments) to generate full-length, modified monomer domains. The fragments and the monomer domain can also be recombined by manipulating nucleic acids encoding domains or fragments thereof. For example, ligating a nucleic acid construct encoding fragments of the monomer domain can be used to generate an altered monomer domain.

[0237] Altered monomer domains can also be generated by providing a collection of synthetic oligonucleotides (e.g., overlapping oligonucleotides) encoding conserved, random, pseudorandom, or a defined sequence of peptide sequences that are then inserted by ligation into a predetermined site in a polynucleotide encoding a monomer domain. Similarly, the sequence diversity of one or more monomer domains can be expanded by mutating the monomer domain(s) with site-directed mutagenesis, random mutation, pseudorandom mutation, defined kernal mutation, codon-based mutation, and the like. The resultant nucleic acid molecules can be propagated in a host for cloning and amplification. In some embodiments, the nucleic acids are shuffled.

[0238] The present invention also provides a method for recombining a plurality of nucleic acids encoding monomer domains and screening the resulting library for monomer domains that bind to the desired ligand or mixture of ligands or the like. Selected monomer domain nucleic acids can also be back-crossed by shuffling with polynucleotide sequences encoding neutral sequences (i.e., having insubstantial functional effect on binding), such as for example, by back-crossing with a wild-type or naturally-occurring sequence substantially identical to a selected sequence to produce native-like functional monomer domains. Generally, during back-crossing, subsequent selection is applied to retain the property, e.g., binding to the ligand.

[0239] In some embodiments, the monomer library is prepared by shuffling. In such a case, monomer domains are isolated and shuffled to combinatorially recombine the nucleic acid sequences that encode the monomer domains (recombination can occur between or within monomer domains, or both). The first step involves identifying a monomer domain having the desired property, e.g., affinity for a certain ligand. While maintaining the conserved amino acids during the recombination, the nucleic acid sequences encoding the monomer domains can be recombined, or recombined and joined into multimers.

[0240] A significant advantage of the present invention is that known ligands, or unknown ligands can be used to select the monomer domains and/or multimers. No prior information regarding ligand structure is required to isolate the monomer domains of interest or the multimers of interest. The monomer domains and/or multimers identified can have biological activity, which is meant to include at least specific binding affinity for a selected or desired ligand, and, in some instances, will further include the ability to block the binding of other compounds, to stimulate or inhibit metabolic pathways, to act as a signal or messenger, to stimulate or inhibit cellular activity, and the like. Monomer domains can be generated to function as ligands for receptors where the natural ligand for the receptor has not yet been identified (orphan receptors). These orphan ligands can be created to either block or activate the receptor to which they bind.

[0241] A single ligand can be used, or optionally a variety of ligands can be used to select the monomer domains and/or multimers. A monomer domain of the present invention can bind a single ligand or a variety of ligands. A multimer of the present invention can have multiple discrete binding sites for a single ligand, or optionally, can have multiple binding sites for a variety of ligands.

[0242] The invention also includes compositions that are produced by methods of the present invention. For example, the present invention includes monomer domains selected or identified from a library and/or libraries comprising monomer domains produced by the methods of the present invention.

[0243] The present invention also provides libraries of monomer domains and libraries of nucleic acids that encode monomer domains. The libraries can include, e.g., about 100, 250, 500 or more nucleic acids encoding monomer domains, or the library can include, e.g., about 100, 250, 500 or more polypeptides that encode monomer domains. Libraries can include monomer domains containing the same cysteine frame, e.g., A-domains or EGF-like domains.

[0244] In some embodiments, variants are generated by recombining two or more different sequences from the same family of monomer domains (e.g., the LDL receptor class A domain). Alternatively, two or more different monomer domains from different families can be combined to form a multimer. In some embodiments, the multimers are formed from monomers or monomer variants of at least one of the following family classes: an EGF-like domain, a Kringle-domain, a fibronectin type I domain, a fibronectin type II domain, a fibronectin type III domain, a PAN domain, a Gla domain, a SRCR domain, a Kunitz/Bovine pancreatic trypsin Inhibitor domain, a Kazal-type serine protease inhibitor domain, a Trefoil (P-type) domain, a von Willebrand factor type C domain, an Anaphylatoxin-like domain, a CUB domain, a thyroglobulin type I repeat, LDL-receptor class A domain, a Sushi domain, a Link domain, a Thrombospondin type I domain, an Immunoglobulin-like domain, a C-type lectin domain, a MAM domain, a von Willebrand factor type A domain, a Somatomedin B domain, a WAP-type four disulfide core domain, a F5/8 type C domain, a Hemopexin domain, an SH2 domain, an SH3 domain, a Laminin-type EGF-like domain, a C2 domain and derivatives thereof. In another embodiment, the monomer domain and the different monomer domain can include one or more domains found in the Pfam database and/or the SMART database. Libraries produced by the methods above, one or more cell(s) comprising one or more members of the library, and one or more displays comprising one or more members of the library are also included in the present invention.

[0245] Optionally, a data set of nucleic acid character strings encoding monomer domains can be generated e.g., by mixing a first character string encoding a monomer domain, with one or more character string encoding a different monomer domain, thereby producing a data set of nucleic acids character strings encoding monomer domains, including those described herein. In another embodiment, the monomer domain and the different monomer domain can include one or more domains found in the Pfam database and/or the SMART database. The methods can further comprise inserting the first character string encoding the monomer domain and the one or more second character string encoding the different monomer domain in a computer and generating a multimer character string(s) or library(s), thereof in the computer.

[0246] The libraries can be screened for a desired property such as binding of a desired ligand or mixture of ligands. For example, members of the library of monomer domains can be displayed and prescreened for binding to a known or unknown ligand or a mixture of ligands. The monomer domain sequences can then be mutagenized (e.g., recombined, chemically altered, etc.) or otherwise altered and the new monomer domains can be screened again for binding to the ligand or the mixture of ligands with an improved affinity. The selected monomer domains can be combined or joined to form multimers, which can then be screened for an improved affinity or avidity or altered specificity for the ligand or the mixture of ligands. Altered specificity can mean that the specificity is broadened, e.g., binding of multiple related viruses, or optionally, altered specificity can mean that the specificity is narrowed, e.g., binding within a specific region of a ligand. Those of skill in the art will recognize that there are a number of methods available to calculate avidity. See, e.g., Mammen et al., Angew Chem Int. Ed. 37:2754-2794 (1998); Muller et al., Anal. Biochem. 261:149-158 (1998).

VI. Selection of Monomer Domains that Bind c-Met

[0247] Preliminary screens can be conducted by screening for agents capable of binding to c-Met, as at least some of the agents so identified are likely c-Met modulators (e.g., antagonists or agonists). The binding assays usually involve contacting a c-Met protein (or a fragment thereof such as a fragment comprising the SEMA rdomain or the α chain) with one or more test agents (i.e., monomers or multimers of the invention) and allowing sufficient time for the protein and test agents to form a binding complex. Any binding complexes formed can be detected using any of a number of established analytical techniques. Protein binding assays include, but are not limited to, immunohistochemical binding assays, flow cytometry or other assays. The c-Met protein utilized in such assays can be naturally expressed, cloned or synthesized.

[0248] The screening methods of the invention can be performed as in vitro or cell-based assays. Cell based assays can be performed in any cells in which c-Met is expressed. Cell-based assays may involve whole cells or cell fractions containing a c-Met receptor to screen for agent binding or modulation of activity of c-Met by the agent. Exemplary cell types that can be used according to the methods of the invention include, e.g., any mammalian cells, as well as fungal cells, including yeast, and bacterial cells. Cells can be primary cells or tumor cells or other types of immortal cell lines. Of course, c-Met can be expressed in cells that do not endogenously contain c-Met.

[0249] c-Met activity assays may also be used to identify a modulator (antagonist or agonist) of c-Met. In these embodiments, one or more test agents are contacted to a cell expressing c-Met and then tested for an activity of c-Met. Exemplary c-Met activities include HGF-dependent or constitutive kinase activity. See, e.g., Christensen et al., Cancer Res. 63:7345-7355 (2003). In other embodiments, down stream molecular events can also be monitored to determine signaling activity. For example, c-Met induces cell growth (proliferation and survival), cell motility, invasion and morphology changes. In addition, c-Met indirectly mediates phosphorylation of Gab-1, Akt, signal transducer and activator of transcription 3, phospholipase C γ, and focal adhesions kinase, among others. See, e.g., Christensen et al., Cancer Res. 63:7345-7355 (2003).

[0250] In some embodiments, activity assays are also used to confirm that identified antagonist monomers or multimers (i.e., that compete with HGF) lack agonist activity (i.e., that they do not activate c-Met in the absence of HGF or another agonist).

[0251] Agents that are initially identified by any of the foregoing screening methods can be further tested to validate the apparent activity. Such studies may be conducted with suitable animal models. The basic format of such methods involves administering a lead compound identified during an initial screen to an animal that serves as a model for humans and then determining if c-Met is in fact modulated and/or the disease or condition is ameliorated. The animal models utilized in validation studies generally are mammals of any kind. Specific examples of suitable animals include, but are not limited to, primates, mice and rats.

[0252] Selection of monomer domains that bind c-Met from a library of domains can be accomplished by a variety of procedures. For example, one method of identifying monomer domains which have a desired property (e.g., binding c-Met) involves translating a plurality of nucleic acids, where each nucleic acid encodes a monomer domain, screening the polypeptides encoded by the plurality of nucleic acids, and identifying those monomer domains that, e.g., bind to a desired ligand or mixture of ligands, thereby producing a selected monomer domain. The monomer domains expressed by each of the nucleic acids can be tested for their ability to bind to the ligand by methods known in the art (i.e. panning, affinity chromatography, FACS analysis).

[0253] As mentioned above, selection of monomer domains can be based on binding to a ligand such as c-Met, or a fragment therof or other target molecule (e.g., lipid, carbohydrate, nucleic acid and the like). Other molecules can optionally be included in the methods along with the target, e.g., ions such as Ca⁺².

[0254] When a monomer domain of the invention is selected based on its ability to bind to a ligand, the selection basis can include selection based on a slow dissociation rate, which is usually predictive of high affinity. The valency of the ligand can also be varied to control the average binding affinity of selected monomer domains. The ligand can be bound to a surface or substrate at varying densities, such as by including a competitor compound, by dilution, or by other method known to those in the art. High density (valency) of predetermined ligand can be used to enrich for monomer domains that have relatively low affinity, whereas a low density (valency) can preferentially enrich for higher affinity monomer domains.

[0255] A variety of reporting display vectors or systems can be used to express nucleic acids encoding the monomer domains and/or multimers of the present invention and to test for a desired activity. For example, a phage display system is a system in which monomer domains are expressed as fusion proteins on the phage surface (Pharmacia, Milwaukee Wis.). Phage display can involve the presentation of a polypeptide sequence encoding monomer domains on the surface of a filamentous bacteriophage, typically as a fusion with a bacteriophage coat protein.

[0256] Generally in these methods, each phage particle or cell serves as an individual library member displaying a single species of displayed polypeptide in addition to the natural phage or cell protein sequences. The nucleic acids are cloned into the phage DNA at a site which results in the transcription of a fusion protein, a portion of which is encoded by the plurality of the nucleic acids. The phage containing a nucleic acid molecule undergoes replication and transcription in the cell. The leader sequence of the fusion protein directs the transport of the fusion protein to the tip of the phage particle. Thus, the fusion protein that is partially encoded by the nucleic acid is displayed on the phage particle for detection and selection by the methods described above and below. For example, the phage library can be incubated with a predetermined ligand such as c-Met or a fragment thereof, so that phage particles which present a fusion protein sequence that binds to the ligand can be differentially partitioned from those that do not present polypeptide sequences that bind to the predetermined ligand. For example, the separation can be provided by immobilizing the predetermined ligand. The phage particles (i.e., library members) which are bound to the immobilized ligand are then recovered and replicated to amplify the selected phage subpopulation for a subsequent round of affinity enrichment and phage replication. After several rounds of affinity enrichment and phage replication, the phage library members that are thus selected are isolated and the nucleotide sequence encoding the displayed polypeptide sequence is determined, thereby identifying the sequence(s) of polypeptides that bind to the predetermined ligand. Such methods are further described in PCT patent publication Nos. 91/17271, 91/18980, and 91/19818 and 93/08278.

[0257] Examples of other display systems include ribosome displays, a nucleotide-linked display (see, e.g., U.S. Pat. Nos. 6,281,344; 6,194,550, 6,207,446, 6,214,553, and 6,258,558), polysome display, cell surface displays and the like. The cell surface displays include a variety of cells, e.g., E. coli, yeast and/or mammalian cells. When a cell is used as a display, the nucleic acids, e.g., obtained by PCR amplification followed by digestion, are introduced into the cell and translated. Optionally, polypeptides encoding the monomer domains or the multimers of the present invention can be introduced, e.g., by injection, into the cell.

[0258] The monomer and multimer libraries of the invention can be screened for a desired property such as binding of a desired ligand (e.g., c-Met) or mixture of ligands. For example, members of the library of monomer domains can be displayed and prescreened for binding to a known or unknown ligand or a mixture of ligands. The monomer domain sequences can then be mutagenized (e.g., recombined, chemically altered, etc.) or otherwise altered and the new monomer domains can be screened again for binding to the ligand or the mixture of ligands with an improved affinity. The selected monomer domains can be combined or joined to form multimers, which can then be screened for an improved affinity or avidity or altered specificity for the ligand or the mixture of ligands. Altered specificity can mean that the specificity is broadened, e.g., binding of multiple related ligands, or optionally, altered specificity can mean that the specificity is narrowed, e.g., binding within a specific region of a ligand. Those of skill in the art will recognize that there are a number of methods available to calculate avidity. See, e.g., Mammen et al., Angew Chem Int. Ed. 37:2754-2794 (1998); Muller et al., Anal. Biochem. 261:149-158 (1998).

[0259] Those of skill in the art will recognize that the steps of generating variation and screening for a desired property can be repeated (i.e., performed recursively) to optimize results. For example, in a phage display library or other like format, a first screening of a library can be performed at relatively lower stringency, thereby selected as many particles associated with a target molecule as possible. The selected particles can then be isolated and the polynucleotides encoding the monomer or multimer can be isolated from the particles. Additional variations can then be generated from these sequences and subsequently screened at higher affinity. FIG. 7 illustrates a generic cycle of selection and generation of variation.

[0260] All the compositions of the present invention, e.g., monomer domains as well as multimers and libraries thereof can be optionally bound to a matrix of an affinity material. Examples of affinity material include beads, a column, a solid support, a microarray, other pools of reagent-supports, and the like.

[0261] When multimers capable of binding relatively large targets are desired, they can be generated by a “walking” selection method. This method is carried out by providing a library of monomer domains and screening the library of monomer domains for affinity to a first target molecule. Once at least one monomer that binds to the target is identified, that monomer is covalently linked to a new library or each remaining member of the original library of monomer domains. This new library of multimers (dimers) is then screened for multimers that bind to the target with an increased affinity, and a multimer that binds to the target with an increased affinity can be identified. The “walking” monomer selection method provides a way to assemble a multimer that is composed of monomers that can act additively or even synergistically with each other given the restraints of linker length. This walking technique is very useful when selecting for and assembling multimers that are able to bind large target proteins with high affinity. The walking method can be repeated to add more monomers thereby resulting in a multimer comprising 2, 3, 4, 5, 6, 7, 8 or more monomers linked together.

[0262] In some embodiments, the selected multimer comprises more than two domains. Such multimers can be generated in a step fashion, e.g., where the addition of each new domain is tested individually and the effect of the domains is tested in a sequential fashion. See, e.g., FIG. 6. In an alternate embodiment, domains are linked to form multimers comprising more than two domains and selected for binding without prior knowledge of how smaller multimers, or alternatively, how each domain, bind.

[0263] The methods of the present invention also include methods of evolving monomers or multimers. As illustrated in FIG. 21, intra-domain recombination can be introduced into monomers across the entire monomer or by taking portions of different monomers to form new recombined units. Interdomain recombination (e.g., recombining different monomers into or between multimers) or recombination of modules (e.g., multiple monomers within a multimer) may be achieved. Inter-library recombination is also contemplated.

[0264] Methods for evolving monomers or multimers can comprise, e.g., any or all of the following steps: providing a plurality of different nucleic acids, where each nucleic acid encoding a monomer domain; translating the plurality of different nucleic acids, which provides a plurality of different monomer domains; screening the plurality of different monomer domains for binding of the desired ligand (e.g., c-Met) or mixture of ligands; identifying members of the plurality of different monomer domains that bind the desired ligand or mixture of ligands, which provides selected monomer domains; joining the selected monomer domains with at least one linker to generate at least one multimer, wherein the at least one multimer comprises at least two of the selected monomer domains and the at least one linker; and, screening the at least one multimer for an improved affinity or avidity or altered specificity for the desired ligand or mixture of ligands as compared to the selected monomer domains.

[0265] Variation can be introduced into either monomers or multimers. An example of improving monomers includes intra-domain recombination in which two or more (e.g., three, four, five, or more) portions of the monomer are amplified separately under conditions to introduce variation (for example by shuffling or other recombination method) in the resulting amplification products, thereby synthesizing a library of variants for different portions of the monomer. By locating the 5′ ends of the middle primers in a “middle” or ‘overlap’ sequence that both of the PCR fragments have in common, the resulting “left” side and “right” side libraries may be combined by overlap PCR to generate novel variants of the original pool of monomers. These new variants may then be screened for desired properties, e.g., panned against a target or screened for a functional effect. The “middle” primer(s) may be selected to correspond to any segment of the monomer, and will typically be based on the scaffold or one or more concensus amino acids within the monomer (e.g., cysteines such as those found in A domains).

[0266] Similarly, multimers may be created by introducing variation at the monomer level and then recombining monomer variant libraries. On a larger scale, multimers (single or pools) with desired properties may be recombined to form longer multimers. In some cases variation is introduced (typically synthetically) into the monomers or into the linkers to form libraries. This may be achieved, e.g., with two different multimers that bind to two different targets, thereby eventually selecting a multimer with a portion that binds to one target and a portion that binds a second target. See, e.g., FIG. 21.

[0267] Additional variation can be introduced by inserting linkers of different length and composition between domains. This allows for the selection of optimal linkers between domains. In some embodiments, optimal length and composition of linkers will allow for optimal binding of domains. In some embodiments, the domains with a particular binding affinity(s) are linked via different linkers and optimal linkers are selected in a binding assay. For example, domains are selected for desired binding properties and then formed into a library comprising a variety of linkers. The library can then be screened to identify optimal linkers. Alternatively, multimer libraries can be formed where the effect of domain or linker on target molecule binding is not known.

[0268] Methods of the present invention also include generating one or more selected multimers by providing a plurality of monomer domains. The plurality of monomer domains is screened for binding of a desired ligand or mixture of ligands. Members of the plurality of domains that bind the desired ligand or mixture of ligands are identified, thereby providing domains with a desired affinity. The identified domains are joined with at least one linker to generate the multimers, wherein each multimer comprises at least two of the selected domains and the at least one linker; and, the multimers are screened for an improved affinity or avidity or altered specificity for the desired ligand or mixture of ligands as compared to the selected domains, thereby identifying the one or more selected multimers.

[0269] Multimer libraries may be generated, in some embodiments, by combining two or more libraries or monomers or multimers in a recombinase-based approach, where each library member comprises as recombination site (e.g., a lox site). A larger pool of molecularly diverse library members in principle harbor more variants with desired properties, such as higher target-binding affinities and functional activities. When libraries are constructed in phage vectors, which may be transformed into E. coli, library size (10⁹-10¹⁰) is limited by the transformation efficiency of E. coli. A recombinase/recombination site system (e.g., the Cre-loxP system) and in vivo recombination can be exploited to generate libraries that are not limited in size by the transformation efficiency of E. coli.

[0270] For example, the Cre-loxP system may be used to generate dimer libraries with 10¹⁰, 10¹¹, 10¹², 10¹³, or greater diversity. In some embodiments, E. coli as a host for one naïve monomer library and a filamentous phage that carries a second naïve monomer library are used. The library size in this case is limited only by the number of infective phage (carrying one library) and the number of infectible E. coli cells (carrying the other library). For example, infecting 10₁₂ E. coli cells (1 L at OD600=1) with >10¹² phage could produce as many as 10¹² dimer combinations.

[0271] Selection of multimers can be accomplished using a variety of techniques including those mentioned above for identifying monomer domains. Other selection methods include, e.g., a selection based on an improved affinity or avidity or altered specificity for the ligand compared to selected monomer domains. For example, a selection can be based on selective binding to specific cell types, or to a set of related cells or protein types (e.g., different virus serotypes). Optimization of the property selected for, e.g., avidity of a ligand, can then be achieved by recombining the domains, as well as manipulating amino acid sequence of the individual monomer domains or the linker domain or the nucleotide sequence encoding such domains, as mentioned in the present invention.

[0272] One method for identifying multimers can be accomplished by displaying the multimers. As with the monomer domains, the multimers are optionally expressed or displayed on a variety of display systems, e.g., phage display, ribosome display, polysome display, nucleotide-linked display (see, e.g., U.S. Pat. Nos. 6,281,344; 6,194,550, 6,207,446, 6,214,553, and 6,258,558) and/or cell surface display, as described above. Cell surface displays can include but are not limited to E. coli, yeast or mammalian cells. In addition, display libraries of multimers with multiple binding sites can be panned for avidity or affinity or altered specificity for a ligand or for multiple ligands.

[0273] Monomers or multimers can be screened for target binding activity in yeast cells using a two-hybrid screening assay. In this type of screen the monomer or multimer library to be screened is cloned into a vector that directs the formation of a fusion protein between each monomer or multimer of the library and a yeast transcriptional activator fragment (i.e., Gal4). Sequences encoding the “target” protein are cloned into a vector that results in the production of a fusion protein between the target and the remainder of the Gal4 protein (the DNA binding domain). A third plasmid contains a reporter gene downstream of the DNA sequence of the Gal4 binding site. A monomer that can bind to the target protein brings with it the Gal4 activation domain, thus reconstituting a functional Gal4 protein. This functional Gal4 protein bound to the binding site upstream of the reporter gene results in the expression of the reporter gene and selection of the monomer or multimer as a target binding protein. (see Chien et. al. (1991) Proc. Natl. Acad. Sci. (USA) 88:9578; Fields S. and Song O. (1989) Nature 340: 245) Using a two-hybrid system for library screening is further described in U.S. Pat. No. 5,811,238 (see also Silver S. C. and Hunt S. W. (1993) Mol. Biol. Rep. 17:155; Durfee et al. (1993) Genes Devel. 7:555; Yang et al. (1992) Science 257:680; Luban et al. (1993) Cell 73:1067; Hardy et al. (1992) Genes Devel. 6:801; Bartel et al. (1993) Biotechniques 14:920; and Vojtek et al. (1993) Cell 74:205). Another useful screening system for carrying out the present invention is the E. coli/BCCP interactive screening system (Germino et al. (1993) Proc. Nat. Acad. Sci. (U.S.A.) 90:993; Guarente L. (1993) Proc. Nat. Acad. Sci. (U.S.A.) 90:1639).

[0274] Other variations include the use of multiple binding compounds, such that monomer domains, multimers or libraries of these molecules can be simultaneously screened for a multiplicity of ligands or compounds that have different binding specificity. Multiple predetermined ligands or compounds can be concomitantly screened in a single library, or sequential screening against a number of monomer domains or multimers. In one variation, multiple ligands or compounds, each encoded on a separate bead (or subset of beads), can be mixed and incubated with monomer domains, multimers or libraries of these molecules under suitable binding conditions. The collection of beads, comprising multiple ligands or compounds, can then be used to isolate, by affinity selection, selected monomer domains, selected multimers or library members. Generally, subsequent affinity screening rounds can include the same mixture of beads, subsets thereof, or beads containing only one or two individual ligands or compounds. This approach affords efficient screening, and is compatible with laboratory automation, batch processing, and high throughput screening methods.

[0275] In another embodiment, multimers can be simultaneously screened for the ability to bind multiple ligands, wherein each ligand comprises a different label. For example, each ligand can be labeled with a different fluorescent label, contacted simultaneously with a multimer or multimer library. Multimers with the desired affinity are then identified (e.g., by FACS sorting) based on the presence of the labels linked to the desired labels.

[0276] Libraries of either monomer domains or multimers (referred in the following discussion for convenience as “affinity agents”) can be screened (i.e., panned) simultaneously against multiple ligands in a number of different formats. For example, multiple ligands can be screened in a simple mixture, in an array, displayed on a cell or tissue (e.g., a cell or tissue provides numerous molecules that can be bound by the monomer domains or multimers of the invention), and/or immobilized. The libraries of affinity agents can optionally be displayed on yeast or phage display systems. Similarly, if desired, the ligands (e.g., encoded in a cDNA library) can be displayed in a yeast or phage display system.

[0277] Initially, the affinity agent library is panned against the multiple ligands. Optionally, the resulting “hits” are panned against the ligands one or more times to enrich the resulting population of affinity agents. See, e.g., FIG. 13.

[0278] If desired, the identity of the individual affinity agents and/or ligands can be determined. In some embodiments, affinity agents are displayed on phage. Affinity agents identified as binding in the initial screen are divided into a first and second portion. See, e.g., FIG. 14. The first portion is infected into bacteria, resulting in either plaques or bacterial colonies, depending on the type of phage used. The expressed phage are immobilized and then probed with ligands displayed in phage selected as described below.

[0279] The second portion are coupled to beads or otherwise immobilized and a phage display library containing at least some of the ligands in the original mixture is contacted to the immobilized second portion. Those phage that bind to the second portion are subsequently eluted and contacted to the immobilized phage described in the paragraph above. Phage-phage interactions are detected (e.g., using a monoclonal antibody specific for the ligand-expressing phage) and the resulting phage polynucleotides can be isolated.

[0280] In some embodiments, the identity of an affinity agent-ligand pair is determined. For example, when both the affinity agent and the ligand are displayed on a phage or yeast, the DNA from the pair can be isolated and sequenced. In some embodiments, polynucleotides specific for the ligand and affinity agent are amplified. Amplification primers for each reaction can include 5′ sequences that are complementary such that the resulting amplification products are fused, thereby forming a hybrid polynucleotide comprising a polynucleotide encoding at least a portion of the affinity agent and at least a portion of the ligand. The resulting hybrid can be used to probe affinity agent or ligand (e.g., cDNA-encoded) polynucleotide libraries to identify both affinity agent and ligand. See, e.g., FIG. 15.

[0281] The above-described methods can be readily combined with “walking” to simultaneous generate and identify multiple multimers, each of which bind to a ligand in a mixture of ligands. In these embodiments, a first library of affinity agents (monomer domains or multimers) are panned against multiple ligands and the eluted affinity agents are linked to the first or a second library of affinity agents to form a library of multimeric affinity agents (e.g., comprising 2, 3, 4, 5, 6, 7, 8, 9, or more monomer), which are subsequently panned against the multiple ligands. This method can be repeated to continue to generate larger multimeric affinity agents. Increasing the number of monomer domains may result in increased affinity and avidity for a particular target. For example, the inventors have found that trimers of monomer domains that bind CD28 have a higher affinity than dimmers, which in turn have a higher affinity than single CD28-binding monomer domains alone. Of course, at each stage, the panning is optionally repeated to enrich for significant binders. In some cases, walking will be facilitated by inserting recombination sites (e.g., lox sites) at the ends of monomers and recombining monomer libraries by a recombinase-mediated event.

[0282] The selected multimers of the above methods can be further manipulated, e.g., by recombining or shuffling the selected multimers (recombination can occur between or within multimers or both), mutating the selected multimers, and the like. This results in altered multimers which then can be screened and selected for members that have an enhanced property compared to the selected multimer, thereby producing selected altered multimers.

[0283] In view of the description herein, it is clear that the following process may be followed. Naturally or non-naturally occurring monomer domains may be recombined or variants may be formed. Optionally the domains initially or later are selected for those sequences that are less likely to be immunogenic in the host for which they are intended. Optionally, a phage library comprising the recombined domains is panned for a desired affinity. Monomer domains or multimers expressed by the phage may be screened for IC₅₀ for a target. Hetero- or homo-meric multimers may be selected. The selected polypeptides may be selected for their affinity to any target, including, e.g., hetero- or homo-multimeric targets.

[0284] Linkers, multimers or selected multimers produced by the methods indicated above and below are features of the present invention. Libraries comprising multimers, e.g, a library comprising about 100, 250, 500 or more members produced by the methods of the present invention or selected by the methods of the present invention are provided. In some embodiments, one or more cell comprising members of the libraries, are also included. Libraries of the recombinant polypeptides are also a feature of the present invention, e.g., a library comprising about 100, 250, 500 or more different recombinant polypetides.

[0285] Compositions of the present invention can be bound to a matrix of an affinity material, e.g., the recombinant polypeptides. Examples of affinity material include, e.g., beads, a column, a solid support, and/or the like.

VII. Therapeutic and Prophylactic Treatment Methods

[0286] The present invention also includes methods of therapeutically or prophylactically treating a disease or disorder by administering in vivo or ex vivo one or more nucleic acids or polypeptides of the invention described above (or compositions comprising a pharmaceutically acceptable excipient and one or more such nucleic acids or polypeptides) to a subject, including, e.g., a mammal, including a human, primate, mouse, pig, cow, goat, rabbit, rat, guinea pig, hamster, horse, sheep; or a non-mammalian vertebrate such as a bird (e.g., a chicken or duck), fish, or invertebrate.

[0287] Antagonists of c-Met are useful treating cancers in which Met is expressed. Exemplary cancers include bladder, breast, cervical, colorectal, oesophageal, gastric, head and neck, kidney, liver, lung, nasopharyngeal, ovarian, pancreatic, gall bladder, prostate or thyroid cancer, osteosarcoma, synovial sarcoma, rhabdomosarcoma, MFH/fibrosarcoma, Kaposi's sarcoma, multiple myeloma, lymphomas, adult T-cell leukemia, glioblastomas, astrocytomas, melanoma, mesothelioma, and Wilm's tumor.

[0288] In one aspect of the invention, in ex vivo methods, one or more cells or a population of cells of interest of the subject (e.g., tumor cells, tumor tissue sample, organ cells, blood cells, cells of the skin, lung, heart, muscle, brain, mucosae, liver, intestine, spleen, stomach, lymphatic system, cervix, vagina, prostate, mouth, tongue, etc.) are obtained or removed from the subject and contacted with an amount of a selected monomer domain and/or multimer of the invention that is effective in prophylactically or therapeutically treating the disease, disorder, or other condition. The contacted cells are then returned or delivered to the subject to the site from which they were obtained or to another site (e.g., including those defined above) of interest in the subject to be treated. If desired, the contacted cells can be grafted onto a tissue, organ, or system site (including all described above) of interest in the subject using standard and well-known grafting techniques or, e.g., delivered to the blood or lymph system using standard delivery or transfusion techniques.

[0289] The invention also provides in vivo methods in which one or more cells or a population of cells of interest of the subject are contacted directly or indirectly with an amount of a selected monomer domain and/or multimer of the invention effective in prophylactically or therapeutically treating the disease, disorder, or other condition. In direct contact/administration formats, the selected monomer domain and/or multimer is typically administered or transferred directly to the cells to be treated or to the tissue site of interest (e.g., tumor cells, tumor tissue sample, organ cells, blood cells, cells of the skin, lung, heart, muscle, brain, mucosae, liver, intestine, spleen, stomach, lymphatic system, cervix, vagina, prostate, mouth, tongue, etc.) by any of a variety of formats, including topical administration, injection (e.g., by using a needle or syringe), or vaccine or gene gun delivery, pushing into a tissue, organ, or skin site. The selected monomer domain and/or multimer can be delivered, for example, intramuscularly, intradermally, subdermally, subcutaneously, orally, intraperitoneally, intrathecally, intravenously, or placed within a cavity of the body (including, e.g., during surgery), or by inhalation or vaginal or rectal administration.

[0290] In in vivo indirect contact/administration formats, the selected monomer domain and/or multimer is typically administered or transferred indirectly to the cells to be treated or to the tissue site of interest, including those described above (such as, e.g., skin cells, organ systems, lymphatic system, or blood cell system, etc.), by contacting or administering the polypeptide of the invention directly to one or more cells or population of cells from which treatment can be facilitated. For example, tumor cells within the body of the subject can be treated by contacting cells of the blood or lymphatic system, skin, or an organ with a sufficient amount of the selected monomer domain and/or multimer such that delivery of the selected monomer domain and/or multimer to the site of interest (e.g., tissue, organ, or cells of interest or blood or lymphatic system within the body) occurs and effective prophylactic or therapeutic treatment results. Such contact, administration, or transfer is typically made by using one or more of the routes or modes of administration described above.

[0291] In another aspect, the invention provides ex vivo methods in which one or more cells of interest or a population of cells of interest of the subject (e.g., tumor cells, tumor tissue sample, organ cells, blood cells, cells of the skin, lung, heart, muscle, brain, mucosae, liver, intestine, spleen, stomach, lymphatic system, cervix, vagina, prostate, mouth, tongue, etc.) are obtained or removed from the subject and transformed by contacting said one or more cells or population of cells with a polynucleotide construct comprising a nucleic acid sequence of the invention that encodes a biologically active polypeptide of interest (e.g., a selected monomer domain and/or multimer) that is effective in prophylactically or therapeutically treating the disease, disorder, or other condition. The one or more cells or population of cells is contacted with a sufficient amount of the polynucleotide construct and a promoter controlling expression of said nucleic acid sequence such that uptake of the polynucleotide construct (and promoter) into the cell(s) occurs and sufficient expression of the target nucleic acid sequence of the invention results to produce an amount of the biologically active polypeptide, encoding a selected monomer domain and/or multimer, effective to prophylactically or therapeutically treat the disease, disorder, or condition. The polynucleotide construct can include a promoter sequence (e.g., CMV promoter sequence) that controls expression of the nucleic acid sequence of the invention and/or, if desired, one or more additional nucleotide sequences encoding at least one or more of another polypeptide of the invention, a cytokine, adjuvant, or co-stimulatory molecule, or other polypeptide of interest.

[0292] Following transfection, the transformed cells are returned, delivered, or transferred to the subject to the tissue site or system from which they were obtained or to another site (e.g., tumor cells, tumor tissue sample, organ cells, blood cells, cells of the skin, lung, heart, muscle, brain, mucosae, liver, intestine, spleen, stomach, lymphatic system, cervix, vagina, prostate, mouth, tongue, etc.) to be treated in the subject. If desired, the cells can be grafted onto a tissue, skin, organ, or body system of interest in the subject using standard and well-known grafting techniques or delivered to the blood or lymphatic system using standard delivery or transfusion techniques. Such delivery, administration, or transfer of transformed cells is typically made by using one or more of the routes or modes of administration described above. Expression of the target nucleic acid occurs naturally or can be induced (as described in greater detail below) and an amount of the encoded polypeptide is expressed sufficient and effective to treat the disease or condition at the site or tissue system.

[0293] In another aspect, the invention provides in vivo methods in which one or more cells of interest or a population of cells of the subject (e.g., including those cells and cells systems and subjects described above) are transformed in the body of the subject by contacting the cell(s) or population of cells with (or administering or transferring to the cell(s) or population of cells using one or more of the routes or modes of administration described above) a polynucleotide construct comprising a nucleic acid sequence of the invention that encodes a biologically active polypeptide of interest (e.g., a selected monomer domain and/or multimer) that is effective in prophylactically or therapeutically treating the disease, disorder, or other condition.

[0294] The polynucleotide construct can be directly administered or transferred to cell(s) suffering from the disease or disorder (e.g., by direct contact using one or more of the routes or modes of administration described above). Alternatively, the polynucleotide construct can be indirectly administered or transferred to cell(s) suffering from the disease or disorder by first directly contacting non-diseased cell(s) or other diseased cells using one or more of the routes or modes of administration described above with a sufficient amount of the polynucleotide construct comprising the nucleic acid sequence encoding the biologically active polypeptide, and a promoter controlling expression of the nucleic acid sequence, such that uptake of the polynucleotide construct (and promoter) into the cell(s) occurs and sufficient expression of the nucleic acid sequence of the invention results to produce an amount of the biologically active polypeptide effective to prophylactically or therapeutically treat the disease or disorder, and whereby the polynucleotide construct or the resulting expressed polypeptide is transferred naturally or automatically from the initial delivery site, system, tissue or organ of the subject's body to the diseased site, tissue, organ or system of the subject's body (e.g., via the blood or lymphatic system). Expression of the target nucleic acid occurs naturally or can be induced (as described in greater detail below) such that an amount of expressed polypeptide is sufficient and effective to treat the disease or condition at the site or tissue system. The polynucleotide construct can include a promoter sequence (e.g., CMV promoter sequence) that controls expression of the nucleic acid sequence and/or, if desired, one or more additional nucleotide sequences encoding at least one or more of another polypeptide of the invention, a cytokine, adjuvant, or co-stimulatory molecule, or other polypeptide of interest.

[0295] In each of the in vivo and ex vivo treatment methods as described above, a composition comprising an excipient and the polypeptide or nucleic acid of the invention can be administered or delivered. In one aspect, a composition comprising a pharmaceutically acceptable excipient and a polypeptide or nucleic acid of the invention is administered or delivered to the subject as described above in an amount effective to treat the disease or disorder.

[0296] In another aspect, in each in vivo and ex vivo treatment method described above, the amount of polynucleotide administered to the cell(s) or subject can be an amount such that uptake of said polynucleotide into one or more cells of the subject occurs and sufficient expression of said nucleic acid sequence results to produce an amount of a biologically active polypeptide effective to enhance an immune response in the subject, including an immune response induced by an immunogen (e.g., antigen). In another aspect, for each such method, the amount of polypeptide administered to cell(s) or subject can be an amount sufficient to enhance an immune response in the subject, including that induced by an immunogen (e.g., antigen).

[0297] In yet another aspect, in an in vivo or in vivo treatment method in which a polynucleotide construct (or composition comprising a polynucleotide construct) is used to deliver a physiologically active polypeptide to a subject, the expression of the polynucleotide construct can be induced by using an inducible on- and off-gene expression system. Examples of such on- and off-gene expression systems include the Tet-On™ Gene Expression System and Tet-Off™ Gene Expression System (see, e.g., Clontech Catalog 2000, pg. 110-111 for a detailed description of each such system), respectively. Other controllable or inducible on- and off-gene expression systems are known to those of ordinary skill in the art. With such system, expression of the target nucleic of the polynucleotide construct can be regulated in a precise, reversible, and quantitative manner. Gene expression of the target nucleic acid can be induced, for example, after the stable transfected cells containing the polynucleotide construct comprising the target nucleic acid are delivered or transferred to or made to contact the tissue site, organ or system of interest. Such systems are of particular benefit in treatment methods and formats in which it is advantageous to delay or precisely control expression of the target nucleic acid (e.g., to allow time for completion of surgery and/or healing following surgery; to allow time for the polynucleotide construct comprising the target nucleic acid to reach the site, cells, system, or tissue to be treated; to allow time for the graft containing cells transformed with the construct to become incorporated into the tissue or organ onto or into which it has been spliced or attached, etc.).

VIII. Additional Multimer Uses

[0298] The potential applications of multimers of the present invention are diverse and include any use where an affinity agent is desired.

[0299] The present invention provides a method for extending the serum half-life of a protein, including, e.g., a multimer of the invention or a protein of interest in an animal. The protein of interest can be any protein with therapeutic, prophylactic, or otherwise desirable functionality. This method comprises first providing a monomer domain that has been identified as a binding protein that specifically binds to a half-life extender such as a blood-carried molecule or cell, such as serum albumin (e.g., human serum albumin), IgG, red blood cells, etc. The half-life extender-binding monomer is then covalently linked to another monomer domain that has a binding affinity for the protein of interest (e.g., Met). This complex formation results in the half-life extension protecting the multimer and/or bound protein(s) from proteolytic degradation and/or other removal of the multimer and/or protein(s) and thereby extending the half-life of the protein and/or multimer. One variation of this use of the invention includes the half-life extender-binding monomer covalently linked to the protein of interest. The protein of interest may include a monomer domain, a multimer of monomer domains, or a synthetic drug. Alternatively, monomers that bind to either immunoglobulins or erythrocytes could be generated using the above method and could be used for half-life extension.

[0300] The half-life extender-binding multimers are typically multimers of at least two domains, chimeric domains, or mutagenized domains (i.e., one that binds to Met and one that binds to the blood-carried molecule or cell). Suitable domains include all of those described herein, that are further screened and selected for binding to a half-life extender. The half-life extender-binding multimers are generated in accordance with the methods for making multimers described herein, using, for example, monomer domains pre-screened for half-life extender-binding activity. For example, some half-life extender-binding LDL receptor class A-domain monomers are described in Example 2 below. The serum half-life of a molecule can be extended to be, e.g., at least 1, 2, 3, 4, 5, 10, 20, 30, 40, 50, 60, 70 80, 90, 100, 150, 200, 250, 400, 500 or more hours.

[0301] In some cases, a pair of monomers or multimers are selected to bind to the same target (i.e., for use in sandwich-based assays). To select a matched monomer or multimer pair, two different monomers or multimers typically are able to bind the target protein simultaneously. One approach to identify such pairs involves the following:
[0302] (1) immobilizing the phage or protein mixture that was previously selected to bind the target protein
[0303] (2) contacting the target protein to the immobilized phage or protein and washing;
[0304] (3) contacting the phage or protein mixture to the bound target and washing; and
[0305] (4) eluting the bound phage or protein without eluting the immobilized phage or protein.

[0306] One use of the multimers or monomer domains of the invention is use to replace antibodies or other affinity agents in detection or other affinity-based assays. Thus, in some embodiments, monomer domains or multimers are selected against the ability to bind components other than a target in a mixture. The general approach can include performing the affinity selection under conditions that closely resemble the conditions of the assay, including mimicking the composition of a sample during the assay. Thus, a step of selection could include contacting a monomer domain or multimer to a mixture not including the target ligand and selecting against any monomer domains or multimers that bind to the mixture. Thus, the mixtures (absent the target ligand, which could be depleted using an antibody, monomer domain or multimer) representing the sample in an assay (serum, blood, tissue, cells, urine, semen, etc) can be used as a blocking agent. Such subtraction is useful, e.g., to create pharmaceutical proteins that bind to their target but not to other serum proteins or non-target tissues.

[0307] For example, the invention can be used in the application for creating antagonists, where the selected monomer domains or multimers block the interaction between two proteins, e.g., the α and β chains of Met and/or between Met and HGF. Optionally, the invention can generate agonists. For example, multimers binding two different proteins, e.g., enzyme and substrate, can enhance protein function, including, for example, enzymatic activity and/or substrate conversion.

[0308] In some embodiments, the monomer domains are used for ligand inhibition, ligand clearance or ligand stimulation. Possible ligands in these methods, include, e.g., HGF.

[0309] If inhibition of ligand binding to a receptor is desired, a monomer domain is selected that binds to the ligand (e.g., HGF) at a portion of the ligand that contacts the ligand's receptor, or that binds to the receptor at a portion of the receptor that binds contacts the ligand, thereby preventing the ligand-receptor interaction. The monomer domains can optionally be linked to a half-life extender, if desired.

[0310] Ligand clearance refers to modulating the half-life of a soluble ligand in, bodily fluid. For example, most monomer domains, absent a half-life extender, have a short half-life. Thus, binding of a monomer domain to the ligand will reduce the half-life of the ligand, thereby reducing ligand concentration by clearing the ligand through the kidney so long as the complex is no larger than the maximum size able to pass through the kidney (less than about 50 or 40 kD). The portion of the ligand (e.g., HGF) bound by the monomer domain will generally not matter, though it may be beneficial to bind the ligand at the portion of the ligand that binds to its receptor (e.g., Met), thereby further inhibiting the ligand's effect. This method is useful for reducing the concentration of any molecule in the bloodstream.

[0311] Alternatively, a multimer comprising a first monomer domain that binds to a half-life extender and a second monomer domain that binds to a portion of the ligand that does not bind to the ligand's receptor can be used to increase the half-life of the ligand.

[0312] In another embodiment, a multimer comprising a first monomer domain that binds to the ligand and a second monomer domain that binds to the receptor can be used to increase the effective affinity of the ligand for the receptor.

[0313] In another embodiment, multimers comprising at least two monomers that bind to receptors are used to bring two receptors into proximity by both binding the multimer, thereby activating the receptors.

[0314] Further examples of potential uses of the invention include monomer domains, and multimers thereof, that are capable of drug binding (e.g., binding radionucleotides for targeting, pharmaceutical binding for half-life extension of drugs, controlled substance binding for overdose treatment and addiction therapy), immune function modulating (e.g., immunogenicity blocking by binding such receptors as CTLA-4, immunogenicity enhancing by binding such receptors as CD80, or complement activation by Fc type binding), and specialized delivery (e.g., slow release by linker cleavage, electrotransport domains, dimerization domains, or specific binding to: cell entry domains, clearance receptors such as FcR, oral delivery receptors such as plgR for trans-mucosal transport, and blood-brain transfer receptors such as transferring).

[0315] In further embodiments, monomers or multimers can be linked to a detectable label (e.g., Cy3, Cy5, etc.) or linked to a reporter gene product (e.g., CAT, luciferase, horseradish peroxidase, alkaline phosphotase, GFP, etc.).

[0316] Monomers or multimers of the invention that bind to Met may also be used in diagnostic and predictive applications in which is is useful to detect Met. For example, detection of Met can be used to predict prognosis of breast cancer, wherein higher abundance of Met than in a normal tissue indicates a poor prognosis. See, e.g., U.S. Pat. No. 6,673,559.

IX. Further Manipulating Monomer Domains and/or Multimer Nucleic Acids And Polypeptides

[0317] As mentioned above, the polypeptide of the present invention can be altered. Descriptions of a variety of diversity generating procedures for generating modified or altered nucleic acid sequences encoding these polypeptides are described herein and the references cited therein.

[0318] Another aspect of the present invention includes the cloning and expression of monomer domains, selected monomer domains, multimers and/or selected multimers coding nucleic acids. Thus, multimer domains can be synthesized as a single protein using expression systems well known in the art. General texts which describe molecular biological techniques useful herein, including the use of vectors, promoters and many other topics relevant to expressing nucleic acids such as monomer domains, selected monomer domains, multimers and/or selected multimers, include Berger and Kimmel, Guide to Molecular Cloning Techniques, Methods in Enzymology volume 152 Academic Press, Inc., San Diego, Calif. (Berger); Sambrook et al., Molecular Cloning—A Laboratory Manual (2nd Ed.), Vol. 1-3, Cold Spring Harbor Laboratory, Cold Spring Harbor, N.Y., 1989 (“Sambrook”) and Current Protocols in Molecular Biology, F. M. Ausubel et al., eds., Current Protocols, a joint venture between Greene Publishing Associates, Inc. and John Wiley & Sons, Inc., (supplemented through 1999) (“Ausubel”)). Examples of techniques sufficient to direct persons of skill through in vitro amplification methods, useful in identifying, isolating and cloning monomer domains and multimers coding nucleic acids, including the polymerase chain reaction (PCR) the ligase chain reaction (LCR), Q-replicase amplification and other RNA polymerase mediated techniques (e.g., NASBA), are found in Berger, Sambrook, and Ausubel, as well as Mullis et al., (1987) U.S. Pat. No. 4,683,202; PCR Protocols A Guide to Methods and Applications (Innis et al. eds) Academic Press Inc. San Diego, Calif. (1990) (Innis); Arnheim & Levinson (Oct. 1, 1990) C&EN 36-47; The Journal Of NIH Research (1991) 3, 81-94; (Kwoh et al. (1989) Proc. Natl. Acad. Sci. USA 86, 1173; Guatelli et al. (1990) Proc. Natl. Acad. Sci. USA 87, 1874; Lomell et al. (1989) J. Clin. Chem 35, 1826; Landegren et al., (1988) Science 241, 1077-1080; Van Brunt (1990) Biotechnology 8, 291-294; Wu and Wallace, (1989) Gene 4, 560; Barringer et al. (1990) Gene 89, 117, and Sooknanan and Malek (1995) Biotechnology 13: 563-564. Improved methods of cloning in vitro amplified nucleic acids are described in Wallace et al., U.S. Pat. No. 5,426,039. Improved methods of amplifying large nucleic acids by PCR are summarized in Cheng et al. (1994) Nature 369: 684-685 and the references therein, in which PCR amplicons of up to 40 kb are generated. One of skill will appreciate that essentially any RNA can be converted into a double stranded DNA suitable for restriction digestion, PCR expansion and sequencing using reverse transcriptase and a polymerase. See, Ausubel, Sambrook and Berger, all supra.

[0319] The present invention also relates to the introduction of vectors of the invention into host cells, and the production of monomer domains, selected monomer domains, multimers and/or selected multimers of the invention by recombinant techniques. Host cells are genetically engineered (i.e., transduced, transformed or transfected) with the vectors of this invention, which can be, for example, a cloning vector or an expression vector. The vector can be, for example, in the form of a plasmid, a viral particle, a phage, etc. The engineered host cells can be cultured in conventional nutrient media modified as appropriate for activating promoters, selecting transformants, or amplifying the monomer domain, selected monomer domain, multimer and/or selected multimer gene(s) of interest. The culture conditions, such as temperature, pH and the like, are those previously used with the host cell selected for expression, and will be apparent to those skilled in the art and in the references cited herein, including, e.g., Freshney (1994) Culture of Animal Cells, a Manual of Basic Technique, third edition, Wiley-Liss, New York and the references cited therein.

[0320] As mentioned above, the polypeptides of the invention can also be produced in non-animal cells such as plants, yeast, fungi, bacteria and the like. Indeed, as noted throughout, phage display is an especially relevant technique for producing such polypeptides. In addition to Sambrook, Berger and Ausubel, details regarding cell culture can be found in Payne et al. (1992) Plant Cell and Tissue Culture in Liquid Systems John Wiley & Sons, Inc. New York, N.Y.; Gamborg and Phillips (eds) (1995) Plant Cell, Tissue and Organ Culture; Fundamental Methods Springer Lab Manual, Springer-Verlag (Berlin Heidelberg New York) and Atlas and Parks (eds) The Handbook of Microbiological Media (1993) CRC Press, Boca Raton, Fla.

[0321] The present invention also includes alterations of monomer domains, immuno-domains and/or multimers to improve pharmacological properties, to reduce immunogenicity, or to facilitate the transport of the multimer and/or monomer domain into a cell or tissue (e.g., through the blood-brain barrier, or through the skin). These types of alterations include a variety of modifications (e.g., the addition of sugar-groups or glycosylation), the addition of PEG, the addition of protein domains that bind a certain protein (e.g., HSA or other serum protein), the addition of proteins fragments or sequences that signal movement or transport into, out of and through a cell. Additional components can also be added to a multimer and/or monomer domain to manipulate the properties of the multimer and/or monomer domain. A variety of components can also be added including, e.g., a domain that binds a known receptor (e.g., a Fc-region protein domain that binds a Fc receptor), a toxin(s) or part of a toxin, a prodomain that can be optionally cleaved off to activate the multimer or monomer domain, a reporter molecule (e.g., green fluorescent protein), a component that bind a reporter molecule (such as a radionuclide for radiotherapy, biotin or avidin) or a combination of modifications.

X. Animal Models

[0322] Another aspect of the invention is the development of specific non-human animal models in which to test the immunogenicity of the monomer or multimer domains. The method of producing such non-human animal model comprises: introducing into at least some cells of a recipient non-human animal, vectors comprising genes encoding a plurality of human proteins from the same family of proteins, wherein the genes are each operably linked to a promoter that is functional in at least some of the cells into which the vectors are introduced such that a genetically modified non-human animal is obtained that can express the plurality of human proteins from the same family of proteins.

[0323] Suitable non-human animals employed in the practice of the present invention include all vertebrate animals, except humans (e.g., mouse, rat, rabbit, sheep, and the like). Typically, the plurality of members of a family of proteins includes at least two members of that family, and usually at least ten family members. In some embodiments, the plurality includes all known members of the family of proteins. Exemplary genes that can be used include those encoding monomer domains, such as, for example, members of the LDL receptor class A-domain family, the EGF-like domain family, as well as the other domain families described herein.

[0324] The non-human animal models of the present invention can be used to screen for immunogenicity of a monomer or multimer domain that is derived from the same family of proteins expressed by the non-human animal model. The present invention includes the non-human animal model made in accordance with the method described above, as well as transgenic non-human animals whose somatic and germ cells contain and express DNA molecules encoding a plurality of human proteins from the same family of proteins (such as the monomer domains described herein), wherein the DNA molecules have been introduced into the transgenic non-human animal at an embryonic stage, and wherein the DNA molecules are each operably linked to a promoter in at least some of the cells in which the DNA molecules have been introduced.

[0325] An example of a mouse model useful for screening LDL receptor class A-domain derived binding proteins is described as follows. Gene clusters encoding the wild type human LDL receptor class A-domain monomers are amplified from human cells using PCR. Almost all of the 200 different A-domains can be amplified with only three separate PCR amplification reactions of about 7 kb each. These fragments are then used to generate transgenic mice according to the method described above. The transgenic mice will recognize the human A-domains as “self”, thus mimicking the “selfness” of a human with regard to A-domains. Individual A-domain-derived monomers or multimers are tested in these mice by injecting the A-domain-derived monomers or multimers into the mice, then analyzing the immune response (or lack of response) generated. The mice are tested to determine if they have developed a mouse anti-human response (MAHR). Monomers and multimers that do not result in the generation of a MAHR are likely to be non-immunogenic when administered to humans.

[0326] Historically, MAHR test in transgenic mice is used to test individual proteins in mice that are transgenic for that single protein. In contrast, the above described method provides a non-human animal model that recognizes an entire family of human proteins as “self,” and that can be used to evaluate a huge number of variant proteins that each are capable of vastly varied binding activities and uses.

XI. Kits

[0327] Kits comprising the components needed in the methods (typically in an unmixed form) and kit components (packaging materials, instructions for using the components and/or the methods, one or more containers (reaction tubes, columns, etc.)) for holding the components are a feature of the present invention. Kits of the present invention may contain a multimer library, or a single type of monomer or multimer. Kits can also include reagents suitable for promoting target molecule binding, such as buffers or reagents that facilitate detection, including detectably-labeled molecules. Standards for calibrating a ligand binding to a monomer domain or the like, can also be included in the kits of the invention.

[0328] The present invention also provides commercially valuable binding assays and kits to practice the assays. In some of the assays of the invention, one or more ligand is employed to detect binding of a monomer domain, immuno-domains and/or multimer. Such assays are based on any known method in the art, e.g., flow cytometry, fluorescent microscopy, plasmon resonance, and the like, to detect binding of a ligand(s) to the monomer domain and/or multimer.

[0329] Kits based on the assay are also provided. The kits typically include a container, and one or more ligand. The kits optionally comprise directions for performing the assays, additional detection reagents, buffers, or instructions for the use of any of these components, or the like. Alternatively, kits can include cells, vectors, (e.g., expression vectors, secretion vectors comprising a polypeptide of the invention), for the expression of a monomer domain and/or a multimer of the invention.

[0330] In a further aspect, the present invention provides for the use of any composition, monomer domain, immuno-domain, multimer, cell, cell culture, apparatus, apparatus component or kit herein, for the practice of any method or assay herein, and/or for the use of any apparatus or kit to practice any assay or method herein and/or for the use of cells, cell cultures, compositions or other features herein as a therapeutic formulation. The manufacture of all components herein as therapeutic formulations for the treatments described herein is also provided.

XII. Integrated Systems

[0331] The present invention provides computers, computer readable media and integrated systems comprising character strings corresponding to monomer domains, selected monomer domains, multimers and/or selected multimers and nucleic acids encoding such polypeptides. These sequences can be manipulated by in silico recombination methods, or by standard sequence alignment or word processing software.

[0332] For example, different types of similarity and considerations of various stringency and character string length can be detected and recognized in the integrated systems herein. For example, many homology determination methods have been designed for comparative analysis of sequences of biopolymers, for spell checking in word processing, and for data retrieval from various databases. With an understanding of double-helix pair-wise complement interactions among 4 principal nucleobases in natural polynucleotides, models that simulate annealing of complementary homologous polynucleotide strings can also be used as a foundation of sequence alignment or other operations typically performed on the character strings corresponding to the sequences herein (e.g., word-processing manipulations, construction of figures comprising sequence or subsequence character strings, output tables, etc.). An example of a software package with GOs for calculating sequence similarity is BLAST, which can be adapted to the present invention by inputting character strings corresponding to the sequences herein.

[0333] BLAST is described in Altschul et al., (1990) J. Mol. Biol. 215:403-410. Software for performing BLAST analyses is publicly available through the National Center for Biotechnology Information (available on the World Wide Web at ncbi.nlm.nih.gov). This algorithm involves first identifying high scoring sequence pairs (HSPs) by identifying short words of length W in the query sequence, which either match or satisfy some positive-valued threshold score T when aligned with a word of the same length in a database sequence. T is referred to as the neighborhood word score threshold (Altschul et al., supra). These initial neighborhood word hits act as seeds for initiating searches to find longer HSPs containing them. The word hits are then extended in both directions along each sequence for as far as the cumulative alignment score can be increased. Cumulative scores are calculated using, for nucleotide sequences, the parameters M (reward score for a pair of matching residues; always >0) and N (penalty score for mismatching residues; always <0). For amino acid sequences, a scoring matrix is used to calculate the cumulative score. Extension of the word hits in each direction are halted when: the cumulative alignment score falls off by the quantity X from its maximum achieved value; the cumulative score goes to zero or below, due to the accumulation of one or more negative-scoring residue alignments; or the end of either sequence is reached. The BLAST algorithm parameters W, T, and X determine the sensitivity and speed of the alignment. The BLASTN program (for nucleotide sequences) uses as defaults a wordlength (W) of 11, an expectation (E) of 10, a cutoff of 100, M=5, N=−4, and a comparison of both strands. For amino acid sequences, the BLASTP program uses as defaults a wordlength (W) of 3, an expectation (E) of 10, and the BLOSUM62 scoring matrix (see Henikoff & Henikoff (1989) Proc. Natl. Acad. Sci. USA 89:10915).

[0334] An additional example of a useful sequence alignment algorithm is PILEUP. PILEUP creates a multiple sequence alignment from a group of related sequences using progressive, pairwise alignments. It can also plot a tree showing the clustering relationships used to create the alignment. PILEUP uses a simplification of the progressive alignment method of Feng & Doolittle, (1987) J. Mol. Evol. 35:351-360. The method used is similar to the method described by Higgins & Sharp, (1989) CABIOS 5:151-153. The program can align, e.g., up to 300 sequences of a maximum length of 5,000 letters. The multiple alignment procedure begins with the pairwise alignment of the two most similar sequences, producing a cluster of two aligned sequences. This cluster can then be aligned to the next most related sequence or cluster of aligned sequences. Two clusters of sequences can be aligned by a simple extension of the pairwise alignment of two individual sequences. The final alignment is achieved by a series of progressive, pairwise alignments. The program can also be used to plot a dendogram or tree representation of clustering relationships. The program is run by designating specific sequences and their amino acid or nucleotide coordinates for regions of sequence comparison. For example, in order to determine conserved amino acids in a monomer domain family or to compare the sequences of monomer domains in a family, the sequence of the invention, or coding nucleic acids, are aligned to provide structure-function information.

[0335] In one aspect, the computer system is used to perform “in silico” sequence recombination or shuffling of character strings corresponding to the monomer domains. A variety of such methods are set forth in “Methods For Making Character Strings, Polynucleotides & Polypeptides Having Desired Characteristics” by Selifonov and Stemmer, filed Feb. 5, 1999 (U.S. Ser. No. 60/118,854) and “Methods For Making Character Strings, Polynucleotides & Polypeptides Having Desired Characteristics” by Selifonov and Stemmer, filed Oct. 12, 1999 (U.S. Ser. No. 09/416,375). In brief, genetic operators are used in genetic algorithms to change given sequences, e.g., by mimicking genetic events such as mutation, recombination, death and the like. Multi-dimensional analysis to optimize sequences can be also be performed in the computer system, e.g., as described in the '375 application.

[0336] A digital system can also instruct an oligonucleotide synthesizer to synthesize oligonucleotides, e.g., used for gene reconstruction or recombination, or to order oligonucleotides from commercial sources (e.g., by printing appropriate order forms or by linking to an order form on the Internet).

[0337] The digital system can also include output elements for controlling nucleic acid synthesis (e.g., based upon a sequence or an alignment of a recombinant, e.g., recombined, monomer domain as herein), i.e., an integrated system of the invention optionally includes an oligonucleotide synthesizer or an oligonucleotide synthesis controller. The system can include other operations that occur downstream from an alignment or other operation performed using a character string corresponding to a sequence herein, e.g., as noted above with reference to assays.

### EXAMPLES

[0338] The following example is offered to illustrate, but not to limit the claimed invention.

### Example 1

[0339] This example describes selection of monomer domains and the creation of multimers.

[0340] Starting materials for identifying monomer domains and creating multimers from the selected monomer domains and procedures can be derived from any of a variety of human and/or non-human sequences. For example, to produce a selected monomer domain with specific binding for a desired ligand or mixture of ligands, one or more monomer domain gene(s) are selected from a family of monomer domains that bind to a certain ligand. The nucleic acid sequences encoding the one or more monomer domain gene can be obtained by PCR amplification of genomic DNA or cDNA, or optionally, can be produced synthetically using overlapping oligonucleotides.

[0341] Most commonly, these sequences are then cloned into a cell surface display format (i.e., bacterial, yeast, or mammalian (COS) cell surface display; phage display) for expression and screening. The recombinant sequences are transfected (transduced or transformed) into the appropriate host cell where they are expressed and displayed on the cell surface. For example, the cells can be stained with a labeled (e.g., fluorescently labeled), desired ligand. The stained cells are sorted by flow cytometry, and the selected monomer domains encoding genes are recovered (e.g., by plasmid isolation, PCR or expansion and cloning) from the positive cells. The process of staining and sorting can be repeated multiple times (e.g., using progressively decreasing concentrations of the desired ligand until a desired level of enrichment is obtained). Alternatively, any screening or detection method known in the art that can be used to identify cells that bind the desired ligand or mixture of ligands can be employed.

[0342] The selected monomer domain encoding genes recovered from the desired ligand or mixture of ligands binding cells can be optionally recombined according to any of the methods described herein or in the cited references. The recombinant sequences produced in this round of diversification are then screened by the same or a different method to identify recombinant genes with improved affinity for the desired or target ligand. The diversification and selection process is optionally repeated until a desired affinity is obtained.

[0343] The selected monomer domain nucleic acids selected by the methods can be joined together via a linker sequence to create multimers, e.g., by the combinatorial assembly of nucleic acid sequences encoding selected monomer domains by DNA ligation, or optionally, PCR-based, self-priming overlap reactions. The nucleic acid sequences encoding the multimers are then cloned into a cell surface display format (i.e., bacterial, yeast, or mammalian (COS) cell surface display; phage display) for expression and screening. The recombinant sequences are transfected (transduced or transformed) into the appropriate host cell where they are expressed and displayed on the cell surface. For example, the cells can be stained with a labeled, e.g., fluorescently labeled, desired ligand or mixture of ligands. The stained cells are sorted by flow cytometry, and the selected multimers encoding genes are recovered (e.g., by PCR or expansion and cloning) from the positive cells. Positive cells include multimers with an improved avidity or affinity or altered specificity to the desired ligand or mixture of ligands compared to the selected monomer domain(s). The process of staining and sorting can be repeated multiple times (e.g., using progressively decreasing concentrations of the desired ligand or mixture of ligands until a desired level of enrichment is obtained). Alternatively, any screening or detection method known in the art that can be used to identify cells that bind the desired ligand or mixture of ligands can be employed.

[0344] The selected multimer encoding genes recovered from the desired ligand or mixture of ligands binding cells can be optionally recombined according to any of the methods described herein or in the cited references. The recombinant sequences produced in this round of diversification are then screened by the same or a different method to identify recombinant genes with improved avidity or affinity or altered specificity for the desired or target ligand. The diversification and selection process is optionally repeated until a desired avidity or affinity or altered specificity is obtained.

### Example 2

[0345] This example describes the selection of monomer domains that are capable of binding to Human Serum Albumin (HSA).

[0346] For the production of phages, E. coli DH10B cells (Invitrogen) were transformed with phage vectors encoding a library of LDL receptor class A-domain variants as a fusions to the pIII phage protein. To transform these cells, the electroporation system MicroPulser (Bio-Rad) was used together with cuvettes provided by the same manufacturer. The DNA solution was mixed with 100 μl of the cell suspension, incubated on ice and transferred into the cuvette (electrode gap 1 mm). After pulsing, 2 ml of SOC medium (2% w/v tryptone, 0.5% w/v yeast extract, 10 mM NaCl, 10 mM MgSO₄, 10 mM MgCl₂) were added and the transformation mixture was incubated at 37 C for 1 h. Multiple transformations were combined and diluted in 500 ml 2xYT medium containing 201 g/m tetracycline and 2 mM CaCl₂. With 10 electroporations using a total of 10 μg ligated DNA 1.2×10⁸ independent clones were obtained.

[0347] 160 ml of the culture, containing the cells which were transformed with the phage vectors encoding the library of the A-domain variant phages, were grown for 24 h at 22 C, 250 rpm and afterwards transferred in sterile centrifuge tubes. The cells were sedimented by centrifugation (15 minutes, 5000 g, 4° C.). The supernatant containing the phage particles was mixed with 1/5 volumes 20% w/v PEG 8000, 15% w/v NaCl, and was incubated for several hours at 4° C. After centrifugation (20 minutes, 10000 g, 4° C.) the precipitated phage particles were dissolved in 2 ml of cold TBS (50 mM Tris, 100 mM NaCl, pH 8.0) containing 2 mM CaCl₂. The solution was incubated on ice for 30 minutes and was distributed into two 1.5 ml reaction vessels. After centrifugation to remove undissolved components (5 minutes, 18500 g, 4° C.) the supernatants were transferred to a new reaction vessel. Phage were reprecipitated by adding 1/5 volumes 20% w/v PEG 8000, 15% w/v NaCl and incubation for 60 minutes on ice. After centrifugation (30 minutes, 18500 g, 4° C.) and removal of the supernatants, the precipitated phage particles were dissolved in a total of 1 ml TBS containing 2 mM CaCl₂. After incubation for 30 minutes on ice the solution was centrifuged as described above. The supernatant containing the phage particles was used directly for the affinity enrichment.

[0348] Affinity enrichment of phage was performed using 96 well plates (Maxisorp, NUNC, Denmark). Single wells were coated for 12 h at RT by incubation with 150 μl of a solution of 100 μg/ml human serum albumin (HSA, Sigma) in TBS. Binding sites remaining after HSA incubation were saturated by incubation with 250 μl 2% w/v bovine serum albumin (BSA) in TBST (TBS with 0.1% v/v Tween 20) for 2 hours at RT. Afterwards, 40 μl of the phage solution, containing approximately 5×10¹¹ phage particles, were mixed with 80 μl TBST containing 3% BSA and 2 mM CaCl₂ for 1 hour at RT. In order to remove non binding phage particles, the wells were washed 5 times for 1 min using 130 μl TBST containing 2 mM CaCl₂.

[0349] Phage bound to the well surface were eluted either by incubation for 15 minutes with 130 μl 0.1 M glycine/HCl pH 2.2 or in a competitive manner by adding 130 μl of 500 μg/ml HSA in TBS. In the first case, the pH of the elution fraction was immediately neutralized after removal from the well by mixing the eluate with 30 μl 1 M Tris/HCl pH 8.0.

[0350] For the amplification of phage, the eluate was used to infect E. coli K91BluKan cells (F⁺). 50 μl of the eluted phage solution were mixed with 50 μl of a preparation of cells and incubated for 10 minutes at RT. Afterwards, 20 ml LB medium containing 20 μg/ml tetracycline were added and the infected cells were grown for 36 h at 22 C, 250 rpm. Afterwards, the cells were sedimented (10 minutes, 5000 g, 4° C.). Phage were recovered from the supernatant by precipitation as described above. For the repeated affinity enrichment of phage particles the same procedure as described in this example was used. After two subsequent rounds of panning against HSA, random colonies were picked and tested for their binding properties against the used target protein.

### Example 3

[0351] This example describes the determination of biological activity of monomer domains that are capable of binding to HSA.

[0352] In order to show the ability of an HSA binding domain to extend the serum half life of a protein in vivo, the following experimental setup was performed. A multimeric A-domain, consisting of an A-domain which was evolved for binding HSA (see Example 2) and a streptavidin binding A-domain was compared to the streptavidin binding A-domain itself. The proteins were injected into mice, which were either loaded or not loaded (as control) with human serum albumin (HSA). Serum levels of a-domain proteins were monitored.

[0353] Therefore, an A-domain, which was evolved for binding HSA (see Example 1) was fused on the genetic level with a streptavidin binding A-domain multimer using standard molecular biology methods (see Maniatis et al.). The resulting genetic construct, coding for an A-domain multimer as well as a hexahistidine tag and a HA tag, were used to produce protein in E. coli. After refolding and affinity tag mediated purification the proteins were dialysed several times against 150 mM NaCl, 5 mM Tris pH 8.0, 100 μM CaCl₂ and sterile filtered (0.45 μM).

[0354] Two sets of animal experiments were performed. In a first set, 1 ml of each prepared protein solution with a concentration of 2.5 μM were injected into the tail vein of separate mice and serum samples were taken 2, 5 and 10 minutes after injection. In a second set, the protein solution described before was supplemented with 50 mg/ml human serum albumin. As described above, 1 ml of each solution was injected per animal. In case of the injected streptavidin binding A-domain dimer, serum samples were taken 2, 5 and 10 minutes after injection, while in case of the trimer, serum samples were taken after 10, 30 and 120 minutes. All experiments were performed as duplicates and individual animals were assayed per time point.

[0355] In order to detect serum levels of A-domains in the serum samples, an enzyme linked immunosorbent assay (ELISA) was performed. Therefore, wells of a maxisorp 96 well microtiter plate (NUNC, Denmark) were coated with each 1 μg anti-His₆-antibody in TBS containing 2 mM CaCl₂ for 1 h at 4 C. After blocking remaining binding sites with casein (Sigma) solution for 1 h, wells were washed three times with TBS containing 0.1% Tween and 2 mM CaCl₂. Serial concentration dilutions of the serum samples were prepared and incubated in the wells for 2 h in order to capture the a-domain proteins. After washing as before, anti-HA-tag antibody coupled to horse radish peroxidase (HRP) (Roche Diagnostics, 25 μg/ml) was added and incubated for 2 h. After washing as described above, HRP substrate (Pierce) was added and the detection reaction developed according to the instructions of the manufacturer. Light absorption, reflecting the amount of a-domain protein present in the serum samples, was measured at a wavelength of 450 nm. Obtained values were normalized and plotted against a time scale.

[0356] Evaluation of the obtained values showed a serum half life for the streptavidin binding A-domain of about 4 minutes without presence of HSA respectively 5.2 minutes when the animal was loaded with HSA. The trimer of A-domains, which contained the HSA binding A-domain, exhibited a serum half life of 6.3 minutes without the presence of HSA but a significantly increased half life of 38 minutes when HSA was present in the animal. This clearly indicates that the HSA binding A-domain can be used as a fusion partner to increase the serum half life of any protein, including protein therapeuticals.

### Example 4

[0357] This example describes experiments demonstrating extension of half-life of proteins in blood.

[0358] To further demonstrate that blood half-life of proteins can be extended using monomer domains of the invention, individual monomer domain proteins selected against monkey serum albumin, human serum albumin, human IgG, and human red blood cells were added to aliquots of whole, heparinized human or monkey blood.

[0359] The following list provides sequences of monomer domains analyzed in this example.

[image]

[0360] Blood aliquots containing monomer protein were then added to individual dialysis bags (25,000 MWCO), sealed, and stirred in 4 L of Tris-buffered saline at room temperature overnight.

[0361] Anti-6×His antibody was immobilized by hydrophobic interaction to a 96-well plate (Nunc). Serial dilutions of serum from each blood sample were incubated with the immobilized antibody for 3 hours. Plates were washed to remove unbound protein and probed with α-HA-HRP to detect monomer.

[0362] Monomers identified as having long half-lives in dialysis experiments were constructed to contain either an HA, FLAG, E-Tag, or myc epitope tag. Four monomers were pooled, containing one protein for each tag, to make two pools.

[0363] One monkey was injected subcutaneously per pool, at a dose of 0.25 mg/kg/monomer in 2.5 mL total volume in saline. Blood samples were drawn at 24, 48, 96, and 120 hours. Anti-6×His antibody was immobilized by hydrophobic interaction to a 96-well plate (Nunc). Serial dilutions of serum from each blood sample were incubated with the immobilized antibody for 3 hours. Plates were washed to remove unbound protein and separately probed with α-HA-HRP, α-FLAG-HRP, α-ETag-HRP, and α-myc-HRP to detect the monomer.

[0364] The following illustrates a comparison between commercial antibodies and an anti-IgG multimer:

| Drug | | Mol. Wt. | | Human T1/2 | | Dosing |
|---|---|---|---|---|---|---|
| Rebif | rIFN-b | 23 | kD | 69 | hrs | Weekly 3× |
| Pegasys | rIFN-a-PEG | 40 | kD | 78 | hrs | Weekly |
| Rituxan | CD20 Antibody | 150 | kD | 78 | hrs | Weekly |
| Enbrel | sTNF-R-Fc | 150 | kD | 103 | hrs | Weekly 2× |
| Multimer | Anti-IgG | 5 | kD | 120 | hrs | Weekly 1-2× |
| Herceptin | Her2 Antibody | 150 | kD | 144 | hrs | Weekly |
| Remicade | TNFa Antibody | 150 | kD | 216 | hrs | Monthly .5× |
| Humira | TNFa Antibody | 150 | kD | 336 | hrs | Monthly 2× |

### Example 5

[0365] This example describes in vivo intra-protein recombination to generate libraries of greater diversity.

[0366] A monomer-encoding plasmid vector (pCK-derived vector; see below), flanked by orthologous loxP sites, was recombined in a Cre-dependent manner with a phage vector via its compatible loxP sites. The recombinant phage vectors were detected by PCR using primers specific for the recombinant construct. DNA sequencing indicated that the correct recombinant product was generated.

[0367] Reagents and Experimental Procedures

[0368] pCK-cre-lox-Mb-loxP. This vector has two particularly relevant features. First, it carries the cre gene, encoding the site-specific DNA recombinase Cre, under the control of P_{lac}. Cre was PCR-amplified from p705-cre (from GeneBridges) with cre-specific primers that incorporated XbaI (5′) and SfiI (3′) at the ends of the PCR product. This product was digested with XbaI and SfiI and cloned into the identical sites of pCK, a bla⁻, Cm^{R} derivative of pCK110919-HC-Bla (pACYC ori), yielding pCK-cre.

[0369] The second feature is the naïve A domain library flanked by two orthologous loxP sites, loxP(wild-type) and loxP(FAS), which are required for the site-specific DNA recombination catalyzed by Cre. See, e.g., Siegel, R. W., et al. FEBS Letters 505:467-473 (2001). These sites rarely recombine with another. loxP sites were built into pCK-cre sequentially. 5′-phosphorylated oligonucleotides loxP(K) and loxP(K_rc), carrying loxP(WT) and EcoRI and HinDIII-compatible overhangs to allow ligation to digested EcoRI and HinDIII-digested pCK, were hybridized together and ligated to pCK-cre in a standard ligation reaction (T4 ligase; overnight at 16 C).

[0370] The resulting plasmid was digested with EcoRI and SphI and ligated to the hybridized, 5′-phosphorylated oligos loxP(L) and loxP (L_rc), which carry loxP(FAS) and EcoRI and SphI-compatible overhangs. To prepare for library construction, a large-scale purification (Qiagen MAXI prep) of pCK-cre-lox-P(wt)-loxP(FAS) was performed according to Qiagen's protocol. The Qiagen-purified plasmid was subjected to CsC1 gradient centrifugation for further purification. This construct was then digested with SphI and BglII and ligated to digested naïve A domain library insert, which was obtained via a PCR-amplification of a preexisting A domain library pool. By design, the loxP sites and Mb are in-frame, which generates Mbs with loxP-encoded linkers. This library was utilized in the in vivo recombination procedure as detailed below.

[0371] fUSE5HA-Mb-lox-lox vector. The vector is a derivative of fUSE5 from George Smith's laboratory (University of Missouri). It was subsequently modified to carry an HA tag for immunodetection assays. loxP sites were built into fUSE5HA sequentially. 5′phosphorylated oligonucleotides loxP(I) and loxP(I)_rc, carrying loxP(WT), a string of stop codons and XmaI and SfiI-compatible overhangs, were hybridized together and ligated to XmaI- and SfiI-digested fUSE5HA in a standard ligation reaction (New England Biolabs T4 ligase; overnight at 16 C).

[0372] The resulting phage vector was next digested with XmaI and SphI and ligated to the hybridized oligos loxP(J) and loxP(J)_rc, which carry loxP(FAS) and overhangs compatible with XmaI and SphI. This construct was digested with XmaI/SfiI and then ligated to pre-cut (XmaI/SfiI) naïve A domain library insert (PCR product). The stop codons are located between the loxP sites, preventing expression of gIII and consequently, the production of infectious phage.

[0373] The ligated vector/library was subsequently transformed into an E. coli host bearing a gIII-expressing plasmid that allows the rescue of the fUSE5HA-Mb-lox-lox phage, as detailed below.

[0374] pCK-gIII. This plasmid carries gIII under the control of its native promoter. It was constructed by PCR-amplifying gIII and its promoter from VCSM13 helper phage (Stratagene) with primers gIIIPromoter_EcoRI and gIIIPromoter_HinDIII. This product was digested with EcoRI and HinDIII and cloned into the same sites of pCK110919-HC-Bla. As gIII is under the control of its own promoter, gIII expression is presumably constitutive. pCK-gIII was transformed into E. coli EC100 (Epicentre).

[0375] In vivo recombination procedure. In summary, the procedure involves the following key steps: a) Production of infective (i.e. rescue) of fUSE5HA-Mb-lox-lox library with an E. coli host expressing gIII from a plasmid; b) Cloning of 2^{nd} library (pCK) and transformation into F⁺ TG1 E. coli; c) Infection of the culture carrying the 2^{nd} library with the rescued fUSE5HA-Mb-lox-lox phage library.

[0376] a. Rescue of phage vector. Electrocompetent cells carrying pCK-gIII were prepared by a standard protocol. These cells had a transformation frequency of 4×10⁸/μg DNA and were electroporated with large-scale ligations (˜5 μg vector DNA) of fUSE5HA-lox-lox vector and the naïve A domain library insert. After individual electroporations (100 ng DNA/electroporation) with ˜70 μL cells/cuvette, 930 μL warm SOC media were added, and the cells were allowed to recover with shaking at 37 C for 1 hour. Next, tetracycline was added to a final concentration of 0.2 μg/mL, and the cells were shaken for ˜45 minutes at 37 C. An aliquot of this culture was removed, 10-fold serially diluted and plated to determine the resulting library size (1.8×10⁷). The remaining culture was diluted into 2×500 mL 2xYT (with 20 μg/mL chloramphenicol and 20 μg/mL tetracycline to select for pCK-gIII and the fUSE5HA-based vector, respectively) and grown overnight at 30 C.

[0377] Rescued phage were harvested using a standard PEG/NaCl precipitation protocol. The titer was approximately 1×10¹² transducing units/mL.

[0378] b. Cloning of the 2^{nd} library and transformation into an E. coli host. The ligated pCK/naïve A domain library is electroporated into a bacterial F⁺ host, with an expected library size of approximately 10⁸. After an hour-long recovery period at 37 C with shaking, the electroporated cells are diluted to OD₆₀₀˜0.05 in 2×YT (plus 20 μg/mL chloramphenicol) and grown to mid-log phase at 37 C before infection by fUSEHA-Mb-lox-lox.

[0379] c. Infection of the culture carrying the 2^{nd} library with the rescued fUSE5HA-Mb-lox-lox phage library. To maximize the generation of recombinants, a high infection rate (>50%) of E. coli within a culture is desirable. The infectivity of E. coli depends on a number of factors, including the expression of the F pilus and growth conditions. E. coli backgrounds TG1 (carrying an F') and K91 (an Hfr strain) were hosts for the recombination system.

Oligonucleotides

loxP(K)
[P-5′ agcttataacttcgtatagaaaggtatatacgaagttatagatctcgtgctgcatgcggtgcg]
loxP(K_rc)
[P-5′ aattcgcaccgcatgcagcacgagatctataacttcgtatatacctttctatacgaagttataagct]
loxP(L)
[P-5′ ataacttcgtatagcatacattatacgaagttatcgag]
loxP(L_rc)
[P-5′ ctcgataacttcgtataatgtatgctatacgaagttatg]
loxP(I)
[P-5′ ccgggagcagggcatgctaagtgagtaataagtgagtaaataacttcgtatatacctttctatacgaagttatcgtctg]
loxP(I)_rc
[P-5′ acgataacttcgtatagaaaggtatatacgaagttatttactcacttattactcacttagcatgccctgctc]
loxP(J)
[5′ ccgggaccagtggcctctggggccataacttcgtatagcatacattatacgaagttatg]
loxP(J)_rc
[5′ cataacttcgtataatgtatgctatacgaagttatggccccagaggccactggtc]
gIIIPromoter_EcoRI
[5′ atggcgaattctcattgtcggcgcaactat
gIIIPromoter_HinDIII
[5′ gataagctttcattaagactccttattacgcag]

### Example 6

[0380] This example describes construction of an EGF-based monomer library.

[0381] The CaEGF domain library, E3, encodes a protein domain of 36-43 amino acids having the following pattern:
[0382] X(5)C1-X(4/6)—C2-X(4,5)—C3-X(8)—C4-X(1)—C5-X(8/12)—C6

[0383] The table below describes for each position which amino acids are encoded in the library based upon the natural diversity of human calcium binding EGF domains:

[0384] The library of DNA sequences, E3, encoding monomeric calcium binding EGF domains, was created by assembly PCR as described in Stemmer et al., Gene 164:49-53 (1995). The oligonucleotides used in this PCR reaction are in two groups, 1 and 2. They are:

| Group 1: | |
|---|---|
| 1. | 5′-AAAAGGCCTCGAGGGCCTGGGTGGCAATGGT-3′ |
| 2. | 5′-CCTGAACCACCACAKHKACCGYKSNBGCACGGAYYCGRCRMACATTC |
| | ATYAAYATCTDYACCATTGCCACCC-3′ |
| 3. | 5′-CCTGAACCACCACAKNTGSCGYYGYKMHSGCACGGAYYCGRCRMACATTC |
| | ATYAAYATCTDYACCATTGCCACCC-3′ |
| 4. | 5′-CCTGAACCACCACAKHKACCGYKSNBGCAARBAYBCGVAHYCWSKBYAC |
| | ATTCATYAAYATCTDYACCATTGCCACCC-3′ |
| 5. | 5′-CCTGAACCACCACAKNTGSCGYYGYKMHSGCAARBAYBCGVAHYCWSKBY |
| | ACATTCATYAAYATCTDYACCATTGCCACCC-3′ |
| 6. | 5′-TGAATTTTCTGTATGAGGTTTTGCTAAACAACTTTCAACAGTTTCGGCCC |
| | CAGAGGCCCTGGAGCCACCTGAACCACCACA-3′ |
| Group 2: | |
| 1. | 5′-ACGGTGCCTACCCGTATGATGTTCCGGATTATGCCCCG |
| | GGTGGCAATGGT-3′ |
| 2. | 5′-CCTGAACCACCACAGHKTDBACCGGHAWAGCCTKSCRSGCASHBACAK |
| | YKAWAGCYACCCDSTRWATYTWBACCATTGCCACCC-3′ |
| 3. | 5′-CCTGAACCACCACAKBYKBTKCYGKYCBSABYCNGCDBAWAGCCTK |
| | BGBKGCASHBACAKYKAWAGCYACCCDSTRWATYTWBACCATTGCCACCC-3′ |
| 4. | 5′-AAAAGGCCCCAGAGGCCCCTGAACCACCACA-3′ |

[0385] where R=A/G, Y=C/T, M=A/C, K=G/T, S=C/G, W=A/T, B-C/G/T, D-A/G/T, H=A/C/T, V=A/C/G, and N=A/C/G/T.

[0386] Following the separate PCRs of the Group 1 and 2 oligonucleotides, the Group 1 PCR fragments were digested with BpmI and group 2 PCR fragments were digested with BsrDI. Digestion products were purified using Qiagen Qiaquick columns and then ligated together. The ligated DNA was then amplified in a PCR using two primers. These are:

5′-AAAAGGCCTCGAGGGCCTGGGTGGCAATGGT-3′
5′-AAAAGGCCCCAGAGGCCCCTGAACCACCACA-3′

[0387] The PCR products were purified with Qiagen Qiaquick columns and digested with SfiI. The digested product was purified with Qiagen Qiaquick columns. The DNA fragments were ligated into the SfiI restriction sites of phage display vector fuse5-HA(G4S)4, a derivative of fuse5 carrying an in-frame HA-epitope and a glycine, serine flexible linker. The amino acids which comprise the flexible linker are: S-G-G-G-G-S-G-G-G-G-S-G-G-G-G-S-G-G-G-G. The ligation mixture was electroporated into TransforMax™ EC100™ electrocompetent E. coli cells. Transformed E. coli cells were grown overnight at 37° C. in 2xYT medium containing 20 μg/ml tetracycline. The resulting library contained 2×10⁹ independent clones. Phage particles were purified from the culture medium by PEG-precipitation. The titer of the phage was 1.3×10¹²/ml. The sequences of 24 individual clones were determined and these were consistent with the library design.

### Example 7

[0388] This example describes construction of an EGF-based monomer library.

[0389] FIG. 19 illustrates the process of intradomain optimization by recombination. Shown is a three-fragment PCR overlap reaction, which recombines three segments of a single domain relative to each other. One can use two, three, four, five or more fragment overlap reactions in the same way as illustrated. This recombination process has many applications. One application is to recombine a large pool of hundreds of previously selected clones without sequence information. All that is needed for each overlap to work is one known region of (relatively) constant sequence that exists in the same location in each of the clones (fixed site approach). For A domains, typically these clones would have been derived from a library in which 20-25 amino acids distributed over all five inter-cysteine segments were randomized. The intra-domain recombination method can also be performed on a pool of sequence-related monomer domains by standard DNA recombination (e.g., Stemmer, Nature 370:389-391 (1994)) based on random fragmentation and reassembly based on DNA sequence homology, which does not require a fixed overlap site in all of the clones that are to be recombined.

[0390] Another application of this process is to create multiple separate, naïve (meaning unpanned) libraries in each of which only one of the intercysteine loops is randomized, to randomize a different loop in each library. After panning of these libraries separately against the target, the selected clones are then recombined. From each panned library only the randomized segment is amplified by PCR and multiple randomized segments are then combined into a single domain, creating a shuffled library which is panned and/or screened for increased potency. This process can also be used to shuffle a small number of clones of known sequence.

[0391] Any common sequence may be used as cross-over points. For A domains or other cysteine-containing monomers, the cysteine residues are logical places for the crossover. However, there are other ways to determine optimal crossover sites, such as computer modeling. Alternatively, residues with highest entropy, or the least number of intramolecular contacts, may also be good sites for crossovers.

[0392] An exemplary method of generating libraries comprised of proteins with randomized inter-cysteine loops is presented below. In this example, in contrast to the separate loop, separate library approach described above, multiple intercysteine loops are randomized simultaneously in the same library.

[0393] An A domain NNK library encoding a protein domain of 39-45 amino acids having the following pattern was constructed:
[0394] C1 —X(4,6)-E1-F-R1-C2-A-X(2,4)-G1-R2-C3I-P—S1-S2-W-V-C4-D1-G2-E2-D2-D3-C5-G3-D4-G4-S3-D5-E3-X(4,6)—C6;
   where,
[0395] C1-C6: cysteines;
[0396] X(n): sequence of n amino acids with any residue at each position;
[0397] E1-E3: glutamine;
[0398] F: phenylalanine;
[0399] R1-R2: arginine;
[0400] A: alanine;
[0401] G1-G4: glycine;
[0402] I: isoleucine;
[0403] P: proline;
[0404] S1-S3: serine;
[0405] W: tryptophan;
[0406] V: valine;
[0407] D1-D5: aspartic acid; and
[0408] C1-C3, C2-C5 & C4-C6 form disulfides.

[0409] The library was constructed by creating a library of DNA sequences, containing tyrosine codons (TAT) or variable non-conserved codons (NNK), by assembly PCR as described in Stemmer et al., Gene 164:49-53 (1995). Compared to the native A-domain scaffold and the design that was used to construct library A1 (described previously) this approach: 1) keeps more of the existing residues in place instead of randomizing these potentially critical residues, and 2) inserts a string of amino acids of variable length of all 20 amino acids (NNK codon), such that the average number of inter-cysteine residues is extended beyond that of the natural A domain or the A1 library. The rate of tyrosine residues was increased by including tyrosine codons in the oligonucleotides, because tyrosines were found to be overrepresented in antibody binding sites, presumably because of the large number of different contacts that tyrosine can make. The oligonucleotides used in this PCR reaction are:

| | |
|---|---|
| 1. | 5′-ATATCCCGGGTCTGGAGGCGTCTGGTGGTTCGTGTNNKNNKNNKNNKGAATTCCGA-3′ |
| 2. | 5′-ATATCCCGGGTCTGGAGGCGTCTGGTGGTTCGTGTNNKNNKNNKNNKNNKGAATTCCGA-3′ |
| 3. | 5′-ATATCCCGGGTCTGGAGGCGTCTGGTGGTTCGTGTNNKNNKNNKNNKNNKNNKGAATTCCGA- |
| | 3′ |
| 4. | 5′-ATATCCCGGGTCTGGAGGCGTCTGGTGGTTCGTGTTATNNKNNKNNKGAATTCCGA-3′ |
| 5. | 5′-ATATCCCGGGTCTGGAGGCGTCTGGTGGTTCGTGTNNKTATNNKNNKNNKGAATTCCGA-3′ |
| 6. | 5′-ATATCCCGGGTCTGGAGGCGTCTGGTGGTTCGTGTNNKTATNNKNNKGAATTCCGA-3′ |
| 7. | 5′-ATATCCCGGGTCTGGAGGCGTCTGGTGGTTCGTGTNNKNNKTATNNKGAATTCCGA-3′ |
| 8. | 5′-ATATCCCGGGTCTGGAGGCGTCTGGTGGTTCGTGTNNKNNKNNKTATGAATTCCGA-3′ |
| 9. | 5′-ATATCCCGGGTCTGGAGGCGTCTGGTGGTTCGTGTNNKNNKNNKTATNNKGAATTCCGA-3′ |
| 10. | 5′-ATACCCAAGAAGACGGTATACATCGTCCMNNMNNTGCACATCGGAATTC-3′ |
| 11. | 5′-ATACCCAAGAAGACGGTATACATCGTCCMNNMNNMNNTGCACATCGGAATTC-3′ |
| 12. | 5′-ATACCCAAGAAGACGGTATACATCGTCCMNNMNNMNNMNNTGCACATCGGAATTC-3′ |
| 13. | 5′-ATACCCAAGAAGACGGTATACATCGTCCATANNNMNNTGCACATCGGAATTC-3′ |
| 14. | 5′-ATACCCAAGAAGACGGTATACATCGTCCMNNATAMNNMNNTGCACATCGGAATTC-3′ |
| 15. | 5′-ATACCCAAGAAGACGGTATACATCGTCCMNNATAMNNTGCACATCGGAATTC-3′ |
| 16. | 5′-ATACCCAAGAAGACGGTATACATCGTCCMNNMNNATATGCACATCGGAATTC-3′ |
| 17. | 5′-ATACCCAAGAAGACGGTATACATCGTCCMNNMNNATAMNNTGCACATCGGAATTC-3′ |
| 18. | 5′-ACCGTCTTCTTGGGTATGTGACGGGGAGGACGATTGTGGTGACGGATCTGACGAG-3′ |
| 19. | 5′-ATATGGCCCCAGAGGCCTGCAATGATCCACCGCCCCCACAMNNMNNMNNMNNCTCGTCAG |
| | ATCCGT-3′ |
| 20. | 5′-ATATGGCCCCAGAGGCCTGCAATGATCCACCGCCCCCACAMNNMNNMNNMNNMNNCTCGTCA |
| | GATCCGT-3′ |
| 21. | 5′-ATATGGCCCCAGAGGCCTGCAATGATCCACCGCCCCCACAMNNMNNMNNMNNMNNMNNC |
| | TCGTCAGATCCGT-3′ |
| 22. | 5′-ATATGGCCCCAGAGGCCTGCAATGATCCACCGCCCCCACAATAMNNMNNMNNCTCGTC |
| | AGATCCGT-3′ |
| 23. | 5′-ATATGGCCCCAGAGGCCTGCAATGATCCACCGCCCCCACAMNNATAMNNMNNMNNCT |
| | CGTCAGATCCGT-3′ |
| 24. | 5′-ATATGGCCCCAGAGGCCTGCAATGATCCACCGCCCCCACAMNNATAMNNMNNCTCGT |
| | CAGATCCGT-3′ |
| 25. | 5′-ATATGGCCCCAGAGGCCTGCAATGATCCACCGCCCCCACAMNNMNNATAMNNCTCG |
| | TCAGATCCGT-3′ |
| 26. | 5′-ATATGGCCCCAGAGGCCTGCAATGATCCACCGCCCCCACAMNNMNNMNNATACTCG |
| | TCAGATCCGT-3′ |
| 27. | 5′- |
| | ATATGGCCCCAGAGGCCTGCAATGATCCACCGCCCCCACAMNNMNNMNNATAMNNCTCGTCAGATCCGT-3′ |

where R=A/G, Y=C/T, M=A/C, K=G/T, S=C/G, W=A/T, B=C/G/T, D=A/G/T, H=A/C/T, V=A/C/G, and N=A/C/G/T

[0410] The library was constructed though an initial round of 10 cycles of PCR amplification using a mixture of 4 pools of oligonucleotides, each pool containing 400 pmols of DNA. Pool 1 contained oligonucleotides 1-9, pool 2 contained 10-17, pool 3 contained only 18 and pool 4 contained 19-27. The fully assembled library was obtained through an additional 8 cycles of PCR using pool 1 and 4. The library fragments were digested with XmaI and SfiI. The DNA fragments were ligated into the corresponding restriction sites of phage display vector fuse5-HA, a derivative of fuse5 carrying an in-frame HA-epitope. The ligation mixture was electroporated into TransforMax™ EC100™ electrocompetent E. coli cells resulting in a library of 2×10⁹ individual clones. Transformed E. coli cells were grown overnight at 37° C. in 2×YT medium containing 20 μg/ml tetracycline. Phage particles were purified from the culture medium by PEG-precipitation and a titer of 1.1×10¹³/ml was determined. Sequences of 24 clones were determined and were consistent with the expectations of the library design.

### Example 8

[0411] This example describes optimization of multimers by optimizing monomers and/or linkers for binding to a target.

[0412] FIG. 20 illustrates an approach for optimizing multimer binding to targets, as exemplified with a trimeric multimer. In the figure, first a library of monomers is panned for binding to the target (e.g., Met). However, some of the monomers may bind at locations on the target that are far away from each other, such that the domains that bind to these sites cannot be connected by a linker peptide. It is therefore useful to create and screen a large library of homo- or heterotrimers from these monomers before optimization of the monomers. These trimer libraries can be screened, e.g., on phage (typical for heterotrimers created from a large pool of monomers) or made and assayed separately (e.g., for homotrimers). By this method, the best trimer is identified. The assays may include binding assays to a target or agonist or antagonist potency determination of the multimer in functional protein- or cell-based assays.

[0413] The monomeric domain(s) of the single best trimer are then optimized as a second step. Homomultimers are easiest to optimize, since only one domain sequence exists, though heteromultimers may also be synthesized. For homomultimers, an increase in binding by the multimer compared to the monomer is an avidity effect.

[0414] After optimization of the domain sequence itself (e.g., by recombining or NNK randomization) and phage panning, the improved monomers are used to construct a dimer with a linker library. Linker libraries may be formed, e.g., from linkers with an NNK composition and/or variable sequence length.

[0415] After panning of this linker library, the best clones (e.g., determined by potency in the inhibition or other functional assay) are converted into multimers composed of multiple (e.g., two, three, four, five, six, seven, eight, etc.) sequence-optimized domains and length- and sequence-optimized linkers.

### Example 9

[0416] This example describes a structural analysis of A domains.

[0417] As with virtually all proteins, only a small fraction of the total surface of an A-domain participates in binding a single target. Based on the solution structure of the domain, adjacent residue positions can be identified which are likely to be able to cooperate in binding to a given target. Herein, such groups of adjacent residues are referred to as structural categories. As an example, four such categories have been identified through examination of the A-domain structure, designated Top, Bottom, Loop 1, and Loop 2. By designing libraries which only allow diversity within a given category, the theoretical sequence space allowed by a library can be significantly reduced, allowing for better coverage of the theoretical space by the physical library. Further, in the case of non-overlapping categories such as the Top and Bottom categories, half-domain sequences selected against different targets can be combined into a single sequence which would be able to bind simultaneously or alternatively to the selected targets. In either case, creating binding sites that occupy only half a domain allows for the creation of molecules that are half as large and would have half the number of immunogenic epitopes, reducing the risk of immunogenicity.

Structural Classification of A-domain Positions

[0418] A canonical A-domain sequence is shown below with high-diversity positions represented as an X. Positions that belong to either the Top, Bottom, Loop 1, or Loop 2 categories are designated with a star.

| | 2 | 3 | 4 | 5 | 6 | 7 | 8 | 9 | 10 | 11 | 12 | 13 | 14 | 15 | 16 | 17 | 18 | 19 | 20 |
|---|---|---|---|---|---|---|---|---|---|---|---|---|---|---|---|---|---|---|---|
| | C | X | X | X | X | F | X | C | X | X | X | X | C | I | X | X | X | W | X |
| Top | • | | • | • | | • | • | • | • | • | • | [symbol] | • | [symbol] | [symbol] | • | [symbol] | [symbol] | • |
| Bottom | • | • | • | • | • | [symbol] | [symbol] | • | [symbol] | • | • | • | • | • | • | [symbol] | • | • | [symbol] |
| Loop 1 | • | [symbol] | [symbol] | [symbol] | [symbol] | • | • | • | • | • | • | • | • | • | [symbol] | [symbol] | [symbol] | • | • |
| Loop 2 | • | • | • | • | • | • | • | • | [symbol] | [symbol] | [symbol] | [symbol] | • | • | • | • | • | • | • |

| | 21 | 22 | 23 | 24 | 25 | 26 | 27 | 28 | 29 | 30 | 31 | 32 | 33 | 34 | 35 | 36 |
|---|---|---|---|---|---|---|---|---|---|---|---|---|---|---|---|---|
| | C | D | G | X | X | D | C | X | D | X | S | D | E | X | X | C |
| Top | • | | [symbol] | [symbol] | [symbol] | [symbol] | • | [symbol] | • | [symbol] | • | • | • | • | • | • |
| Bottom | • | • | • | • | • | • | • | • | [symbol] | • | [symbol] | • | • | [symbol] | [symbol] | • |
| Loop 1 | • | • | • | • | • | • | • | • | • | • | • | • | • | • | • | • |
| Loop 2 | • | • | • | • | • | • | • | [symbol] | [symbol] | [symbol] | • | • | • | • | • | • |

### Example 10

[0419] This example describes screening for monomers or multimers that bind c-Met.

[0420] Phage libraries are panned through several rounds either on solid support (i.e. Maxisorp plates) or in solution (i.e. Dynal Streptavidin beads). The panning is repeated on each enriched library several times in order to select for a pool with the enrichment and maximal diversity.

I. Round 1 (Maxisorp Plates or Dynal Beads)

[0421] 1. Coating Target

[0422] A. Coating plates: Six wells/library are coated with c-Met (approximately 0.5 μg/well) using 100 μL/well of 5 μg/mL pure c-Met diluted in TBS[pH 7.5]/2 mM CaCl₂. In addition, one negative control well/library is coated with TBS[pH 7.5]/2 mM CaCl₂ only. The plates are then incubated for 1.5 hrs. at room temperature with shaking.

[0423] B. Coating beads: 20 μL Dynal streptavidin beads (M−280) plus 5 μg biotinylated target are incubated in 500 μL TBS[pH 7.5]/2 mM CaCl₂ and rotated at room temperature for 1 hr. in Eppendorf tubes. As a negative control, 20 uL Dynal streptavidin beads without target are incubated in 500 uL of TBS[pH 7.5]/2 mM CaCl₂ and rotated at room temperature for 1 hr. Dynal beads are typically washed at least twice with TBS [pH 7.5]/2 mM CaCl₂ before adding target and beads are coated in bulk.

[0424] 2. Blocking

[0425] A. Blocking Plates: Coating solution is removed and wells are washed one time with 200 μL/well of TBS[pH 7.5]/2 mM CaCl₂. 250 μl/well of 1% BSA (protease free) in TBS[pH 7.5]/2 mM CaCl₂ is added and incubated for 1 hr. at room temperature with shaking. Alternative reagents can be used to block if BSA contains proteins closely related to the target of interest (for example reagents such as casein or milk).

[0426] B. Blocking e Beads: Coating solution is removed and beads are washed twice with TBS [pH 7.5]/2 mM CaCl₂; add 500 μl 1% BSA (protease free) in TBS[pH 7.5]/2 mM CaCl₂ and rotated for 1 hr. at room temperature.

[0427] 3. Washes

[0428] A. Wash Plates: Wells are washed three times with 200 μL/well of TBS[pH 7.5]/2 mM CaCl₂ to remove excess target.

[0429] B. Wash Beads: Beads are washed three times with 1000 μL of TBS[pH 7.5]/2 mM CaCl₂ to remove excess target. Beads are allowed to collect on a magnet for a few minutes after each wash to avoid bead loss.

[0430] 4. Phage Addition

[0431] A. Phaze addition to Plates: About 1000 library equivalents are added in 1% nonfat dry milk/0.2% BSA (protease free) (or appropriate blocking agent) in TBS [pH 7.5]/2 mM CaCl₂ and incubated at room temperature for 2 hours with shaking. In rounds 2-3, 100 μL total of harvested phage is added to 7 wells (6 target+1 negative control) diluted in phage addition buffer.

[0432] B. Phage addition to Beads: About 1000 library equivalents are added in 500 μl 1% non-fat dry milk+100 μl 1% BSA (protease free) in TBS [pH 7.5]/2 mM CaCl₂ and incubated with rotation at room temperature for 2 hr. In rounds 2-3, 100 μL total of harvested phage are added to beads.

[0433] 5. Washes

[0434] A. Washing Plates: The plates are washed eight times with 200 μl/well of TBS [pH 7.5]/2 mM CaCl₂/0.1% Tween-20 over a period of 10 minutes.

[0435] B. Washing Beads: The beads are washed with 800 μl of TBS [pH 7.5]/2 mM CaCl₂/0.1% Tween-20 over a period of 30-45 mins. Bead resuspension is facilitated by dispensing wash buffer directly onto collected beads or by pipetting up and down.

[0436] Conditions for Stringent Washes (Options)

[0437] a. 800 μl of TBS [pH 7.5]/2 mM CaCl₂/0.1% Tween-20 at 37 C;

[0438] b. 800 μl of TBS [450 mM NaCl, pH 7.5]/2 mM CaCl₂/0.1% Tween-20 at room temperature;

[0439] c. Wash beads normally 6-8×, then add unlabeled 1 μg of c-Met for 1 hour at room temperature or 37 C. Phage that survive this wash are retained for elution/infection;

[0440] d. 1% milk/0.2% BSA/with or without 1 M urea/37 C (high stringency).

[0441] 6. Competition (Optional):

[0442] A. Competition on Plates: Phage are incubated with 100 μL/well of 50 μg/mL or 5 μg/well (10× over target) of c-Met competitor in TBS [pH 7.5]/2 mM CaCl₂ for 1 hr. at room temperature, with shaking.

[0443] B. Competition on Beads: Phage are incubated with 10 μg c-Met in 500 μL TBS [pH 7.5]/2 mM CaCl₂ for 1 hr. at room temperature with shaking.

[0444] 7. Phage Elution

[0445] A. Elution off of Plates: 100 μL/well of 10 mg/mL trypsin in TBS [pH 7.5]/2 mM CaCl₂ is added and incubated at 37 C for 30 min; with shaking.

[0446] B. Elution off of Beads: 100 μL 10 mg/ml trypsin TBS [pH 7.5]/2 mM CaCl₂ is added to beads and incubated at 37° C. for 30 min; shaking in Eppendorf rack at 37° C.

[0447] C. Alternative elution/infection: 200 uL of log-phase BlueKan K91 cells at OD600˜0.5 are added to each well (for plates) or to aspirated beads. The infection is allowed to proceed for 30 minutes at 37 C without shaking. Next, the 200 uL volumes are pooled and added to ˜3 mL of 2×YT/0.2 μg/mL tetracycline and shaken for 15 minutes.

[0448] 8. Infection: (Same for Plate and Bead Protocol)

[0449] An appropriate volume of BlueKan K91 (in 2xYT/40 μg/mL kanamycin) are grown to OD₆₀₀ ˜0.5-0.6. When the culture reaches this OD₆₀₀, culture may be placed on ice prior to use, although the time on ice is generally minimized.

[0450] A. In 50 mL sterile conical tube, the eluted phage is mixed with 5 mL of BlueKan K91 culture and incubated at 37° C. for 25 minutes without shaking, covering sterile conical tubes with AirPore tape in order to allow for aeration.

[0451] B. Tetracycline is added to a final concentration of 0.2 μg/mL and shaken for 15 minutes at 37° C.

[0452] C. A 30 μL aliquot is sampled for titering and diluted 10-fold (10⁻¹ to 10⁻⁶) in 2×YT, plated in 8 μL/dilution in spots on 2×YT/20 μg/ml tetracycline plates and incubated plates overnight at 30° C. or 37° C. The remaining volume of 10⁻²-10⁻⁴ dilutions is plated to obtain single colonies for phage ELISAs.

[0453] D. Infected cultures are diluted ˜10-fold into 50 mL 2×YT/20 μg/mL tetracycline and incubated with shaking at 30° C. overnight to saturation.

[0454] 9. Titer sample of input phage used in the current round of panning (same for Plate and Bead Protocol)

[0455] A. 100-fold serial dilutions of harvested phage (10⁻⁴ to 10⁻¹) are made in 2×YT.

[0456] B. 100 μL/well of OD₆₀₀ 0.5-0.6 BlueKan K91 is added to 6 wells of 96-well polypropylene plate.

[0457] C. 10 μL of diluted phage is added to wells containing 100 μL of BlueKan K91 cells.

[0458] D. Phage are incubated at 37 C for 25 minutes without shaking, with the plates covered with AirPore tape to allow for aeration.

[0459] E. Tetracycline is added to a final concentration of 0.2 μg/mL and the plate is shaen for 15 minutes at 37° C.

[0460] F. 8 μL of each dilution (10⁻⁴ to 10⁻¹⁰) is plated onto a dry 2×YT agar/20 μg/mL tetracycline plate.

[0461] G. Plates are incubated at 30° C. or 37° C. overnight.

[0462] 10. Harvesting Phage (Same for Plate and Bead Protocols)

[0463] A. Cultures are centrifuged overnight at 7000 rpm in disposable 50 mL tubes for 25 min to pellet cells.

[0464] B. A standard PEG/NaCl precipitation protocol is performed by adding 1/5 volume of a 20% PEG/15% NaCl stock to culture supernatant; mixing and incubating on ice for 45 minutes ˜1 hour.

[0465] C. The culture is then centrifuged at 7000 rpm for 40 minutes to pellet phage and the supernatant is removed.

[0466] D. The phage pellet is resuspended in 1 mL TBS [pH 7.5]/2 mM CaCl₂ and transfered to an Eppendorf tube and centrifuged at 13 K rpm for at least 2 minutes to pellet insoluble material.

[0467] E. Supernatant is transferred to fresh tube and 1/5 volume of PEG/NaCl is added, vortexed and incubated on ice for 5 mins.

[0468] F. The supernatant is then centrifuged at 13 K rpm for at least 2 minutes, removed and purified phage is resuspended in up to 1 mL TBS [pH 7.5]/2 mM CaCl₂ and stored at 4° C.

II. Round 2 and Round 3 Panning

[0469] The 2^{nd} and 3^{rd} round panning conditions are generally the same as round 1 described above, except the coated target (i.e., c-Met) amount is decreased 2 to 4 fold for each next round, and the plates (and beads) are washed more times for each next round of panning.

III. Optional Intra-Domain Recombination

[0470] The final pool of monomer panning is optionally recombined by dividing the sequences of monomers into at least two fragments and mixing the two fragments. Two sets of oligos are used to PCR each fragment of the monomer, and then the entire monomer is fused by overlapping PCR and amplified. Once the fragments are fused together and amplified the DNAs are then cut by a restriction enzyme to allow for cloning and ligated into cut fuse5 phage vector. Recombined monomer libraries are then panned two more rounds.

IV. Analysis of Panning Output (Same for Plate and Bead Protocols)

[0471] Phage ELISAs: For each output to be analyzed (typically Rounds 2, 3 and 4, if applicable), independent clones ae inoculated in 1 mL (2xYT/20 μg/mL tetracycline) cultures grown in costar 96-well polypropylene deep-well plates, leaving inoculating tips in and shaken overnight at 37° C. Cells are pelleted by centrifugation at 3600 rpm for 15 minutes. Culture supernatants are retained and ELISAs are performed as discussed below.

[0472] 96-well Maxisorp plate are coated with 50 μL/well of 50 μg/mL (2.5 μg/well). Streptavidin is diluted in TBS [pH 7.5]/2 mM CaCl₂ and the plate is incubated at 37° C. for 1 hr with shaking. Plates are washed three times with 200 μL/well of TBS [pH 7.5]/2 mM CaCl₂. Wells are blocked with 200 μL/well of 1% BSA (fraction V) and the covered plate is incubated at RT for 1 hr with shaking. The plate is washed three times with TBS [pH 7.5]/2 mM CaCl₂. The 96-well Maxisorp plate is coated with 100 μL/well of 1 μg/mL (0.1 μg/well) c-Met diluted in TBS [pH 7.5]/2 mM CaCl₂ or 100 μL/well buffer only (negative control). The plate is incubated at RT for 1 hr. with shaking. Plates are washed three times with TBS [pH 7.5]/2 mM CaCl₂. Phage is added to wells. First, 70 μL of 1% Milk/0.2% BSA/[pH 7.5]/2 mM CaCl₂/0.02% Tween-20 is added to the wells, then 30 μL each of phage supernatant is added from spun down overnight 1 mL culture to 1 positive (+SA-bn-CD40 L) well and to 1 negative (+SA only) well. Covered plates are incubated at RT for 1.5 hrs with shaking.

[0473] Plates are washed four times with TBS [pH 7.5]/2 mM CaCl₂/0.02% Tween-20. Note: 100 μL/well of α-M13-HRP detection antibody diluted 1:5000 in TBS [pH 7.5]/2 mM CaCl₂+0.02% Tween-20 is added. Covered plates are incubated at 4° C. for 1 hr with shaking. Plates are washed three times with cold TBS [pH 7.5]/2 mM CaCl₂/0.02% Tween-20. 100 μL/well of TMB/H₂O₂ mixture diluted 1:1 is added.

[0474] Color is allowed to turn blue until OD₆₅₀ reaches ˜1.0. The reaction is stopped with 100 μL/well 2N H₂SO₄. Positive wells should change in color from blue to yellow. Once the reaction is stopped it can be read on ELISA plate reader OD₄₅₀ using SoftMaxPro software.

[0475] Selected phage are amplified overnight by infection of K91 cells. The phage are then purified by PEG/NaCl precipitation of culture supernatants. To clone the monomer or multimer sequences into the expression vector, pEve, approximately 10¹⁰ phage are amplified by 20 cycles of PCR as follows:
[0476] 5 ul 10× Buffer
[0477] 8 ul 2.5 mM dNTPs
[0478] 5 ul 10 uM VS—For primer (5′-ATCATCTGGCCGGTCCGGCCTACCCGTATGATGTTCCGGA-3′)
[0479] 5 ul 10 uM EveNut primer (5′-AAAAGGCCCCAGAGGCCTTCTGCAATGAC-3′)
[0480] 1 ul Phage
[0481] 26 ul H₂O
[0482] 0.5 ul LA Taq (1 unit) TAKARA
[0483] Cycle 20×[94° C./10 sec.-45° C./30 sec.-72° C./30 sec.]

[0484] The PCR is then run on a 3% Agarose gel, the approximately 200 bp product is purified with a QIAquick column (Qiagen), digested with Sfi I (NEB), purified again with a QIAquick column and then ligated with T4 DNA Ligase (NEB) to the Sfi I digested vector, pEve. The ligation is used to transform electro-competent BL21 (DE3) E. coli and plated onto 2×YT plates containing Kanamycin at 40 μg/ml. Following growth, approximately 6000 individual clones are picked into 1×YT/Kan and grown overnight;—included on the palte are wells that will serve as positive and negative controls.

[0485] Monomers may be purified in parallel in E. coli BL21DE3 (transformed with monomer-variants cloned in pETHC) in a parallel manner and subsequently purified by boiling.

[0486] Optionally, the selected pEve/monomer clone plasmid DNAs are digested in separate reactions with BsrDI and BpmI (NEB). The 10.1 kb BsrDI and 2.9 kb BpmI bands are isolated from 1% Agarose gels and purified with QIAquick columns. The DNAs are ligated together with T4 DNA Ligase (NEB). The ligation is purified with a QIAquick column and amplified as described for Phage Sub-cloning. The 400 bp product is then purified, ligated and transformed as described for Phage Sub-cloning. Protein can be expressed and purified from these and screened using the same methods described above.

[0487] Additional libraries referred to as “walking libraries” are generated by ligating the selected monomers with the full representation of random domains (generated using the same methods used to generate the monomer libraries). These “walking libraries” are then panned and screened as described above.

[0488] While the foregoing invention has been described in some detail for purposes of clarity and understanding, it will be clear to one skilled in the art from a reading of this disclosure that various changes in form and detail can be made without departing from the true scope of the invention. For example, all the techniques, methods, compositions, apparatus and systems described above can be used in various combinations. All publications, patents, patent applications, or other documents cited in this application are incorporated by reference in their entirety for all purposes to the same extent as if each individual publication, patent, patent application, or other document were individually indicated to be incorporated by reference for all purposes.

What is claimed is:

1. A polypeptide comprising a monomer domain that binds to c-Met, wherein the monomer domain:
is a non-naturally-occurring monomer domain consisting of 30 to 50 amino acids;
comprises at least one disulfide bond; and
binds to an ion.

2. The polypeptide of claim, wherein binding of at least one monomer domain to c-Met inhibits dimerization of Met.

3. The polypeptide of claim 1, wherein at least one monomer domain binds to the Sema domain of c-Met, thereby preventing binding of Met ligands to c-Met.

4. The polypeptide of claim 1, wherein the polypeptide comprises at least one and no more than six monomer domains.

5. The polypeptide of claim 1, wherein the polypeptide comprises at least two monomer domains and the monomer domains are linked by a linker.

6. The polypeptide of claim 5, wherein the linker is a peptide linker.

7. The polypeptide of claim 6, wherein the linker is between 4 to 12 amino acids long.

8. The polypeptide of claim 1, wherein the monomer domains are each between 35 to 45 amino acids.

9. The polypeptide of claim 1, wherein the polypeptide comprises at least one monomer domain with binding specificity for a blood factor, thereby increasing the serum half-life of the polypeptide compared to a polypeptide lacking the blood factor monomer domain.

10. The polypeptide of claim 9, wherein the blood factor is serum albumin, an immunoglobulin or an erythrocyte.

11. The polypeptide of claim 1, wherein each monomer domain comprises two disulfide bonds.

12. The polypeptide of claim 1, wherein each monomer domain comprises three disulfide bonds.

13. The polypeptide of claim 1, wherein the ion is a metal ion.

14. The polypeptide of claim 1, wherein the ion is a calcium ion.

15. The polypeptide of claim 1, wherein at least one of the monomer domains is derived from a LDL-receptor class A domain.

16. The polypeptide of claim 1, wherein at least one of the monomer domains is derived from an EGF-like domain.

17. The polypeptide of claim 1, wherein the monomer comprises an amino acid sequence in which:
at least 10% of the amino acids in the sequence are cysteine; and/or
at least 25% of the amino acids are non-naturally-occurring amino acids.

18. A method for identifying a polypeptide that binds to c-Met, the method comprising,
screening a library of polypeptides for affinity to c-Met; and
selecting a polypeptide comprising at least one monomer domain that binds to c-Met, wherein the monomer domain:
is a non-naturally-occurring monomer domain;
comprises at least one disulfide bond; and
binds to an ion.

19. The method of claim 18, wherein the selecting step comprises selecting a polypeptide that reduces HGF-mediated cell proliferation and/or migration.

20. The method of claim 18, further comprising selecting a polypeptide that inhibits tumor growth in an animal.

21. The method of claim 18, wherein the monomer comprises an amino acid sequence in which:
at least 10% of the amino acids in the sequence are cysteine; and/or
at least 25% of the amino acids are non-naturally-occurring amino acids.

22. The method of claim 18, further comprising linking the monomer domain in the selected polypeptide to a second monomer domain to form a library of multimers, each multimer comprising at least two monomer domains;
screening the library of multimers for the ability to bind to c-Met; and
selecting a multimer that binds c-Met.

23. The method of claim 18, further comprising linking the monomer domain in the selected polypeptide to a second monomer domain to form a library of multimers, each multimer comprising at least two monomer domains;
screening the library of multimers for the ability to bind to a target molecule other than the c-Met; and
selecting a multimer that binds to the target molecule.

24. The method of claim 18, further comprising a step of mutating at least one monomer domain, thereby providing a library comprising mutated monomer domains.

25. The method of claim 18, wherein the library of monomer domains is expressed as a phage display, ribosome display or cell surface display.

26. The method of claim 18, wherein the polypeptide comprises at least two monomer domains and the monomer domains are linked by a linker.

27. The method of claim 26, wherein the linker is a peptide linker.

28. The method of claim 27, wherein the linker is between 4 to 12 amino acids long.

29. The method of claim 18, wherein the monomer domains are each between 35 to 45 amino acids.

30. The method of claim 18, wherein each monomer domain comprises two disulfide bonds.

31. The method of claim 18, wherein each monomer domain comprises three disulfide bonds.

32. The method of claim 18, wherein the ion is a metal ion.

33. The method of claim 18, wherein the ion is a calcium ion.

34. The method of claim 18, wherein at least one of the monomer domains is derived from a LDL-receptor class A domain.

35. The method of claim 18, wherein at least one of the monomer domains is derived from an EGF-like domain.

36. The method of claim 18, wherein the monomer domain comprises an amino acid sequence in which:
at least 10% of the amino acids in the sequence are cysteine; and/or
at least 25% of the amino acids are non-naturally-occurring amino acids.

37. A polynucleotide encoding the polypeptide of claim 1.

The application's sequence listing, which the Patent Office published only in electronic form, follows.

SEQUENCE LISTING (471 sequences)

SEQ ID NO: 1 - protein, 1390 aa, Homo sapiens
  c-Met, Hepatocyte Growth Factor/Scatter Factor (HGF/SF)-binding receptor tyrosine kinase
MKAPAVLAPGILVLLFTLVQRSNGECKEALAKSEMNVNMKYQLPNFTAETPIQNVILHEHHIFLGATNYIYVLNEEDLQKVAEYKTGPVLEHPDCFPCQDCSSKANLSGGVWKDNINMALVVDTYYDDQLISCGSVNRGTCQRHVFPHNHTADIQSEVHCIFSPQIEEPSQCPDCVVSALGAKVLSSVKDRFINFFVGNTINSSYFPDHPLHSISVRRLKETKDGFMFLTDQSYIDVLPEFRDSYPIKYVHAFESNNFIYFLTVQRETLDAQTFHTRIIRFCSINSGLHSYMEMPLECILTEKRKKRSTKKEVFNILQAAYVSKPGAQLARQIGASLNDDILFGVFAQSKPDSAEPMDRSAMCAFPIKYVNDFFNKIVNKNNVRCLQHFYGPNHEHCFNRTLLRNSSGCEARRDEYRTEFTTALQRVDLFMGQFSEVLLTSISTFIKGDLTIANLGTSEGRFMQVVVSRSGPSTPHVNFLLDSHPVSPEVIVEHTLNQNGYTLVITGKKITKIPLNGLGCRHFQSCSQCLSAPPFVQCGWCHDKCVRSEECLSGTWTQQICLPAIYKVFPNSAPLEGGTRLTICGWDFGFRRNNKFDLKKTRVLLGNESCTLTLSESTMNTLKCTVGPAMNKHFNMSIIISNGHGTTQYSTFSYVDPVITSISPKYGPMAGGTLLTLTGNYLNSGNSRHISIGGKTCTLKSVSNSILECYTPAQTISTEFAVKLKIDLANRETSIFSYREDPIVYEIHPTKSFISGGSTITGVGKNLNSVSVPRMVINVHEAGRNFTVACQHRSNSEIICCTTPSLQQLNLQLPLKTKAFFMLDGILSKYFDLIYVHNPVFKPFEKPVMISMGNENVLEIKGNDIDPEAVKGEVLKVGNKSCENIHLHSEAVLCTVPNDLLKLNSELNIEWKQAISSTVLGKVIVQPDQNFTGLIAGVVSISTALLLLLGFFLWLKKRKQIKDLGSELVRYDARVHTPHLDRLVSARSVSPTTEMVSNESVDYRATFPEDQFPNSSQNGSCRQVQYPLTDMSPILTSGDSDISSPLLQNTVHIDLSALNPELVQAVQHVVIGPSSLIVHFNEVIGRGHFGCVYHGTLLDNDGKKIHCAVKSLNRITDIGEVSQFLTEGIIMKDFSHPNVLSLLGICLRSEGSPLVVLPYMKHGDLRNFIRNETHNPTVKDLIGFGLQVAKGMKYLASKKFVHRDLAARNCMLDEKFTVKVADFGLARDMYDKEYYSVHNKTGAKLPVKWMALESLQTQKFTTKSDVWSFGVLLWELMTRGAPPYPDVNTFDITVYLLQGRRLLQPEYCPDPLYEVMLKCWHPKAEMRPSFSELVSRISAIFSTFIGEHYVHVNATYVNVKCVAPYPSLLSSEDNADDEVDTRPASFWETS

SEQ ID NO: 2 - protein, 37 aa, Artificial Sequence
  human LDL-receptor class A domain
CNPGQFACRSGTIQCIPLPWQCDGWATCEDESDEANC

SEQ ID NO: 3 - protein, 35 aa, Artificial Sequence
  human LDL-receptor class A domain
CQADEFRCDNGKCLPGPWQCNTVDECGDGSDEGNC

SEQ ID NO: 4 - protein, 38 aa, Artificial Sequence
  human LDL-receptor class A domain
CPGGTFPCSGARSTRCLPVERRCDGLQDCGDGSDEAGC

SEQ ID NO: 5 - protein, 46 aa, Artificial Sequence
  human LDL-receptor class A domain
CLPWEQPCGSSSDSDGGSLGDQGCFSEPQRCDGWWHCASGRDEQGC

SEQ ID NO: 6 - protein, 37 aa, Artificial Sequence
  human LDL-receptor class A domain
CPPDQYPCEGGSGLCYTPADRCNNQKSCPDGADEKNC

SEQ ID NO: 7 - protein, 35 aa, Artificial Sequence
  human LDL-receptor class A domain
CQPGTFHCGTNLCIFETWRCDGQEDCQDGSDEHGC

SEQ ID NO: 8 - protein, 37 aa, Artificial Sequence
  human LDL-receptor class A domain
CSPDQFACATGEIDCIPGAWRCDGFPECDDQSDEEGC

SEQ ID NO: 9 - protein, 35 aa, Artificial Sequence
  human LDL-receptor class A domain
CSAAQFPCARGQCVDLRLRCDGEADCQDRSDEVDC

SEQ ID NO: 10 - protein, 35 aa, Artificial Sequence
  human LDL-receptor class A domain
CLPNQFRCASGQCVLIKQQCDSFPDCIDGSDELMC

SEQ ID NO: 11 - protein, 37 aa, Artificial Sequence
  human LDL-receptor class A domain
CSPQQFTCFTGEIDCIPVAWRCDGFTECEDHSDELNC

SEQ ID NO: 12 - protein, 35 aa, Artificial Sequence
  human LDL-receptor class A domain
CSESQFQCASGQCIDGALRCNGDANCQDKSDEKNC

SEQ ID NO: 13 - protein, 35 aa, Artificial Sequence
  human LDL-receptor class A domain
CLIDQFRCANGQCIGKHKKCDHNVDCSDKSDELDC

SEQ ID NO: 14 - protein, 35 aa, Artificial Sequence
  human LDL-receptor class A domain
CACDQFRCGNGKCIPEAWKCNNMDECGDSSDEEIC

SEQ ID NO: 15 - protein, 40 aa, Artificial Sequence
  human LDL-receptor class A domain
CAYNQFQCLSRFTKVYTCLPESLKCDGNIDCLDLGDEIDC

SEQ ID NO: 16 - protein, 36 aa, Artificial Sequence
  human LDL-receptor class A domain
CLPWEIPCGGNWGCYTEQQRCDGYWHCPNGRDETNC

SEQ ID NO: 17 - protein, 36 aa, Artificial Sequence
  human LDL-receptor class A domain
CQKEEFPCSRNGVCYPRSDRCNYQNHCPNGSDEKNC

SEQ ID NO: 18 - protein, 35 aa, Artificial Sequence
  human LDL-receptor class A domain
CQPGNFHCKNNRCVFESWVCDSQDDCGDGSDEENC

SEQ ID NO: 19 - protein, 36 aa, Artificial Sequence
  human LDL-receptor class A domain
CGRGENFLCASGICIPGKLQCNGYNDCDDWSDEAHC

SEQ ID NO: 20 - protein, 35 aa, Artificial Sequence
  human LDL-receptor class A domain
CSENLFHCHTGKCLNYSLVCDGYDDCGDLSDEQNC

SEQ ID NO: 21 - protein, 36 aa, Artificial Sequence
  human LDL-receptor class A domain
CNPTTEHRCGDGRCIAMEWVCDGDHDCVDKSDEVNC

SEQ ID NO: 22 - protein, 36 aa, Artificial Sequence
  human LDL-receptor class A domain
CHSQGLVECRNGQCIPSTFQCDGDEDCKDGSDEENC

SEQ ID NO: 23 - protein, 35 aa, Artificial Sequence
  human LDL-receptor class A domain
CSPSHFKCRSGQCVLASRRCDGQADCDDDSDEENC

SEQ ID NO: 24 - protein, 37 aa, Artificial Sequence
  human LDL-receptor class A domain
CKERDLWECPSNKQCLKHTVICDGFPDCPDYMDEKNC

SEQ ID NO: 25 - protein, 35 aa, Artificial Sequence
  human LDL-receptor class A domain
CQDDELECANHACVSRDLWCDGEADCSDSSDEWDC

SEQ ID NO: 26 - protein, 36 aa, Artificial Sequence
  human LDL-receptor class A domain
CSNSGIECDSSGTCINPSNWCDGVSHCPGGEDENRC

SEQ ID NO: 27 - protein, 35 aa, Artificial Sequence
  human LDL-receptor class A domain
CSGKYRCRSSFKCIELIARCDGVSDCKDGEDEYRC

SEQ ID NO: 28 - protein, 34 aa, Artificial Sequence
  human LDL-receptor class A domain
CPGQFTCRTGRCIRKELRCDGWADCTDHSDELNC

SEQ ID NO: 29 - protein, 36 aa, Artificial Sequence
  human LDL-receptor class A domain
CDAGHQFTCKNKFCKPLFWVCDSVNDCGDNSDEQGC

SEQ ID NO: 30 - protein, 35 aa, Artificial Sequence
  human LDL-receptor class A domain
CPAQTFRCSNGKCLSKSQQCNGKDDCGDGSDEASC

SEQ ID NO: 31 - protein, 36 aa, Artificial Sequence
  human LDL-receptor class A domain
CTKHTYRCLNGLCLSKGNPECDGKEDCSDGSDEKDC

SEQ ID NO: 32 - protein, 38 aa, Artificial Sequence
  human LDL-receptor class A domain
CLPGSSPCTDALTCIKADLFCDGEVNCPDGSDEDNKMC

SEQ ID NO: 33 - protein, 35 aa, Artificial Sequence
  human LDL-receptor class A domain
CKADHFQCKNGECVPLVNLCDGHLHCEDGSDEADC

SEQ ID NO: 34 - protein, 35 aa, Artificial Sequence
  human LDL-receptor class A domain
CQPTQFRCSNGCCIDSFLECDDTPNCPDASDEAAC

SEQ ID NO: 35 - protein, 42 aa, Artificial Sequence
  human LDL-receptor class A domain
CYTQKADSPMDDFFQCVNGKYISQMKACDGINDCGDQSDELC

SEQ ID NO: 36 - protein, 35 aa, Artificial Sequence
  human LDL-receptor class A domain
CQGKGFHCKSGVCIPSQYQCNGEVDCITGEDEVGC

SEQ ID NO: 37 - protein, 34 aa, Artificial Sequence
  human LDL-receptor class A domain
CKNKFRCDSGRCIARKLECNGENDCGDNSDERDC

SEQ ID NO: 38 - protein, 35 aa, Artificial Sequence
  human LDL-receptor class A domain
CGERFRCFSGQCISKSLVCNGDSDCDEDSADEDRC

SEQ ID NO: 39 - protein, 35 aa, Artificial Sequence
  human LDL-receptor class A domain
CGQDFQCKETGRCLKRHLVCNGDQDCLDGSDEDDC

SEQ ID NO: 40 - protein, 34 aa, Artificial Sequence
  human LDL-receptor class A domain
CEGFVCAQTGRCVNRRLLCNGDNDCGDQSDEANC

SEQ ID NO: 41 - protein, 34 aa, Artificial Sequence
  human LDL-receptor class A domain
CGNDFQCSTGRCIKMRLRCNGDNDCGDFSDEDDC

SEQ ID NO: 42 - protein, 36 aa, Artificial Sequence
  human LDL-receptor class A domain
CTEAEFACHSYNECVALEYRCDRRPDCRDMSDELNC

SEQ ID NO: 43 - protein, 35 aa, Artificial Sequence
  human LDL-receptor class A domain
CGPQEAACRNGHCIPRDYLCDGQEDCEDGSDELDC

SEQ ID NO: 44 - protein, 35 aa, Artificial Sequence
  human LDL-receptor class A domain
CEPNEFPCGNGHCALKLWRCDGDFDCEDRTDEANC

SEQ ID NO: 45 - protein, 36 aa, Artificial Sequence
  human LDL-receptor class A domain
CGPTQFRCVSTNMCIPASFHCDEESDCPDRSDEFGC

SEQ ID NO: 46 - protein, 35 aa, Artificial Sequence
  human LDL-receptor class A domain
CLRNQYRCSNGNCINSIWWCDFDNDCGDMSDERNC

SEQ ID NO: 47 - protein, 37 aa, Artificial Sequence
  human LDL-receptor class A domain
CDLDTQFRCQESGTCIPLSYKCDLEDDCGDNSDESHC

SEQ ID NO: 48 - protein, 35 aa, Artificial Sequence
  human LDL-receptor class A domain
CRSDEYNCSSGMCIRSSWVCDGDNDCRDWSDEANC

SEQ ID NO: 49 - protein, 37 aa, Artificial Sequence
  human LDL-receptor class A domain
CEASNFQCRNGHCIPQRWACDGDTDCQDGSDEDPVNC

SEQ ID NO: 50 - protein, 33 aa, Artificial Sequence
  human LDL-receptor class A domain
CNGFRCPNGTCIPSSKHCDGLRDCSDGSDEQHC

SEQ ID NO: 51 - protein, 41 aa, Artificial Sequence
  human LDL-receptor class A domain
CTHFMDFVCKNRQQCLFHSMVCDGIIQCRDGSDEDAAFAGC

SEQ ID NO: 52 - protein, 35 aa, Artificial Sequence
  human LDL-receptor class A domain
CDEFGFQCQNGVCISLIWKCDGMDDCGDYSDEANC

SEQ ID NO: 53 - protein, 36 aa, Artificial Sequence
  human LDL-receptor class A domain
CSRYFQFRCENGHCIPNRWKCDRENDCGDWSDEKDC

SEQ ID NO: 54 - protein, 35 aa, Artificial Sequence
  human LDL-receptor class A domain
CLPNYYRCSSGTCVMDTWVCDGYRDCADGSDEEAC

SEQ ID NO: 55 - protein, 36 aa, Artificial Sequence
  human LDL-receptor class A domain
CDRFEFECHQPKTCIPNWKRCDGHQDCQDGRDEANC

SEQ ID NO: 56 - protein, 36 aa, Artificial Sequence
  human LDL-receptor class A domain
CMSREFQCEDGEACIVLSERCDGFLDCSDESDEKAC

SEQ ID NO: 57 - protein, 35 aa, Artificial Sequence
  human LDL-receptor class A domain
CEKDQFQCRNERCIPSVWRCDEDDDCLDHSDEDDC

SEQ ID NO: 58 - protein, 37 aa, Artificial Sequence
  human LDL-receptor class A domain
CADSDFTCDNGHCIHERWKCDGEEECPDGSDESEATC

SEQ ID NO: 59 - protein, 37 aa, Artificial Sequence
  human LDL-receptor class A domain
CPAEKLSCGPTSHKCVPASWRCDGEKDCEGGADEAGC

SEQ ID NO: 60 - protein, 35 aa, Artificial Sequence
  human LDL-receptor class A domain
CAPHEFQCGNRSCLAAVFVCDGDDDCGDGSDERGC

SEQ ID NO: 61 - protein, 40 aa, Artificial Sequence
  human LDL-receptor class A domain
CGPREFRCGGDGGGACIPERWVCDRQFDCEDRSDEAAELC

SEQ ID NO: 62 - protein, 36 aa, Artificial Sequence
  human LDL-receptor class A domain
CATVSQFACRSGECVHLGWRCDGDRDCKDKSDEADC

SEQ ID NO: 63 - protein, 35 aa, Artificial Sequence
  human LDL-receptor class A domain
CRGDEFQCGDGTCVLAIKHCNQEQDCPDGSDEAGC

SEQ ID NO: 64 - protein, 37 aa, Artificial Sequence
  human LDL-receptor class A domain
CERNEFQCQDGKCISYKWVCDGSAECQDGSDESQETC

SEQ ID NO: 65 - protein, 37 aa, Artificial Sequence
  human LDL-receptor class A domain
CKSGDFSCGGRVNRCIPQFWRCDGQVDCDNGSDEQGC

SEQ ID NO: 66 - protein, 35 aa, Artificial Sequence
  human LDL-receptor class A domain
CSQDEFRCHDGKCISRQFVCDSDRDCLDGSDEASC

SEQ ID NO: 67 - protein, 37 aa, Artificial Sequence
  human LDL-receptor class A domain
CGPASFQCNSSTCIPQLWACDNDPDCEDGSDEWPQRC

SEQ ID NO: 68 - protein, 35 aa, Artificial Sequence
  human LDL-receptor class A domain
CSAFEFHCLSGECIHSSWRCDGGPDCKDKSDEENC

SEQ ID NO: 69 - protein, 35 aa, Artificial Sequence
  human LDL-receptor class A domain
CRPDEFQCSDGNCIHGSRQCDREYDCKDMSDEVGC

SEQ ID NO: 70 - protein, 38 aa, Artificial Sequence
  human LDL-receptor class A domain
CEGPNKFKCHSGECITLDKVCNMARDCRDWSDEPIKEC

SEQ ID NO: 71 - protein, 35 aa, Artificial Sequence
  human LDL-receptor class A domain
CEPSQFQCTNGRCITLLWKCDGDEDCVDGSDEKNC

SEQ ID NO: 72 - protein, 37 aa, Artificial Sequence
  human LDL-receptor class A domain
CAESDFVCNNGQCVPSRWKCDGDPDCEDGSDESPEQC

SEQ ID NO: 73 - protein, 37 aa, Artificial Sequence
  human LDL-receptor class A domain
CRIHEISCGAHSTQCIPVSWRCDGENDCDSGEDEENC

SEQ ID NO: 74 - protein, 35 aa, Artificial Sequence
  human LDL-receptor class A domain
CSPDEFTCSSGRCISRNFVCNGQDDCSDGSDELDC

SEQ ID NO: 75 - protein, 37 aa, Artificial Sequence
  human LDL-receptor class A domain
CGAHEFQCSTSSCIPISWVCDDDADCSDQSDESLEQC

SEQ ID NO: 76 - protein, 35 aa, Artificial Sequence
  human LDL-receptor class A domain
CPASEIQCGSGECIHKKWRCDGDPDCKDGSDEVNC

SEQ ID NO: 77 - protein, 35 aa, Artificial Sequence
  human LDL-receptor class A domain
CRPDQFECEDGSCIHGSRQCNGIRDCVDGSDEVNC

SEQ ID NO: 78 - protein, 38 aa, Artificial Sequence
  human LDL-receptor class A domain
CLGPGKFKCRSGECIDISKVCNQEQDCRDWSDEPLKEC

SEQ ID NO: 79 - protein, 38 aa, Artificial Sequence
  human LDL-receptor class A domain
CSPKQFACRDQITCISKGWRCDGERDCPDGSDEAPEIC

SEQ ID NO: 80 - protein, 37 aa, Artificial Sequence
  human LDL-receptor class A domain
CQPNEHNCLGTELCVPMSRLCNGVQDCMDGSDEGPHC

SEQ ID NO: 81 - protein, 37 aa, Artificial Sequence
  human LDL-receptor class A domain
CQPGEFACANSRCIQERWKCDGDNDCLDNSDEAPALC

SEQ ID NO: 82 - protein, 37 aa, Artificial Sequence
  human LDL-receptor class A domain
CPSDRFKCENNRCIPNRWLCDGDNDCGNSEDESNATC

SEQ ID NO: 83 - protein, 36 aa, Artificial Sequence
  human LDL-receptor class A domain
CPPNQFSCASGRCIPISWTCDLDDDCGDRSDESASC

SEQ ID NO: 84 - protein, 36 aa, Artificial Sequence
  human LDL-receptor class A domain
CFPLTQFTCNNGRCININWRCDNDNDCGDNSDEAGC

SEQ ID NO: 85 - protein, 37 aa, Artificial Sequence
  human LDL-receptor class A domain
CSSTQFKCNSGRCIPEHWTCDGDNDCGDYSDETHANC

SEQ ID NO: 86 - protein, 36 aa, Artificial Sequence
  human LDL-receptor class A domain
CHTDEFQCRLDGLCIPLRWRCDGDTDCMDSSDEKSC

SEQ ID NO: 87 - protein, 37 aa, Artificial Sequence
  human LDL-receptor class A domain
CDPSVKFGCKDSARCISKAWVCDGDNDCEDNSDEENC

SEQ ID NO: 88 - protein, 38 aa, Artificial Sequence
  human LDL-receptor class A domain
CRPPSHPCANNTSVCLPPDKLCDGNDDCGDGSDEGELC

SEQ ID NO: 89 - protein, 38 aa, Artificial Sequence
  human LDL-receptor class A domain
CRAQDEFECANGECINFSLTCDGVPHCKDKSDEKPSYC

SEQ ID NO: 90 - protein, 35 aa, Artificial Sequence
  human LDL-receptor class A domain
CKKTFRQCSNGRCVSNMLWCNGADDCGDGSDEIPC

SEQ ID NO: 91 - protein, 35 aa, Artificial Sequence
  human LDL-receptor class A domain
CGVGEFRCRDGTCIGNSSRCNQFVDCEDASDEMNC

SEQ ID NO: 92 - protein, 45 aa, Artificial Sequence
  human LDL-receptor class A domain
CSSYFRLGVKGVLFQPCERTSLCYAPSWVCDGANDCGDYSDERDC

SEQ ID NO: 93 - protein, 35 aa, Artificial Sequence
  human LDL-receptor class A domain
CPLNYFACPSGRCIPMSWTCDKEDDCEHGEDETHC

SEQ ID NO: 94 - protein, 36 aa, Artificial Sequence
  human LDL-receptor class A domain
CSEAQFECQNHRCISKQWLCDGSDDCGDGSDEAAHC

SEQ ID NO: 95 - protein, 39 aa, Artificial Sequence
  human LDL-receptor class A domain
CGPSSFSCPGTHVCVPERWLCDGDKDCADGADESIAAGC

SEQ ID NO: 96 - protein, 36 aa, Artificial Sequence
  human LDL-receptor class A domain
CDDREFMCQNRQCIPKHFVCDHDRDCADGSDESPEC

SEQ ID NO: 97 - protein, 40 aa, Artificial Sequence
  human LDL-receptor class A domain
CGPSEFRCANGRCLSSRQWECDGENDCHDQSDEAPKNPHC

SEQ ID NO: 98 - protein, 36 aa, Artificial Sequence
  human LDL-receptor class A domain
CNASSQFLCSSGRCVAEALLCNGQDDCGDSSDERGC

SEQ ID NO: 99 - protein, 36 aa, Artificial Sequence
  human LDL-receptor class A domain
CTASQFVCKNDKCIPFWWKCDTEDDCGDHSDEPPDC

SEQ ID NO: 100 - protein, 35 aa, Artificial Sequence
  human LDL-receptor class A domain
CRPGQFQCSTGICTNPAFICDGDNDCQDNSDEANC

SEQ ID NO: 101 - protein, 36 aa, Artificial Sequence
  human LDL-receptor class A domain
CLPSQFKCTNTNRCIPGIFRCNGQDNCGDGEDERDC

SEQ ID NO: 102 - protein, 37 aa, Artificial Sequence
  human LDL-receptor class A domain
CAPNQFQCSITKRCIPRVWVCDRDNDCVDGSDEPANC

SEQ ID NO: 103 - protein, 38 aa, Artificial Sequence
  human LDL-receptor class A domain
CGVDEFRCKDSGRCIPARWKCDGEDDCGDGSDEPKEEC

SEQ ID NO: 104 - protein, 35 aa, Artificial Sequence
  human LDL-receptor class A domain
CEPYQFRCKNNRCVPGRWQCDYDNDCGDNSDEESC

SEQ ID NO: 105 - protein, 35 aa, Artificial Sequence
  human LDL-receptor class A domain
CSESEFSCANGRCIAGRWKCDGDHDCADGSDEKDC

SEQ ID NO: 106 - protein, 35 aa, Artificial Sequence
  human LDL-receptor class A domain
CDMDQFQCKSGHCIPLRWRCDADADCMDGSDEEAC

SEQ ID NO: 107 - protein, 37 aa, Artificial Sequence
  human LDL-receptor class A domain
CPLDEFQCNNTLCKPLAWKCDGEDDCGDNSDENPEEC

SEQ ID NO: 108 - protein, 37 aa, Artificial Sequence
  human LDL-receptor class A domain
CPPNRPFRCKNDRVCLWIGRQCDGTDNCGDGTDEEDC

SEQ ID NO: 109 - protein, 36 aa, Artificial Sequence
  human LDL-receptor class A domain
CKDKKEFLCRNQRCLSSSLRCNMFDDCGDGSDEEDC

SEQ ID NO: 110 - protein, 35 aa, Artificial Sequence
  human LDL-receptor class A domain
CDSAHFRCGSGHCIPADWRCDGTKDCSDDADEIGC

SEQ ID NO: 111 - protein, 37 aa, Artificial Sequence
  human LDL-receptor class A domain
CQQGYFKCQSEGQCIPSSWVCDQDQDCDDGSDERQDC

SEQ ID NO: 112 - protein, 35 aa, Artificial Sequence
  human LDL-receptor class A domain
CSSHQITCSNGQCIPSEYRCDHVRDCPDGADENDC

SEQ ID NO: 113 - protein, 33 aa, Artificial Sequence
  human LDL-receptor class A domain
CEQLTCDNGACYNTSQKCDWKVDCRDSSDEINC

SEQ ID NO: 114 - protein, 35 aa, Artificial Sequence
  human LDL-receptor class A domain
CLHNEFSCGNGECIPRAYVCDHDNDCQDGSDEHAC

SEQ ID NO: 115 - protein, 35 aa, Artificial Sequence
  human LDL-receptor class A domain
CGGYQFTCPSGRCIYQNWVCDGEDDCKDNGDEDGC

SEQ ID NO: 116 - protein, 42 aa, Artificial Sequence
  human LDL-receptor class A domain
CSPREWSCPESGRCISIYKVCDGILDCPGREDENNTSTGKYC

SEQ ID NO: 117 - protein, 35 aa, Artificial Sequence
  human LDL-receptor class A domain
CGLFSFPCKNGRCVPNYYLCDGVDDCHDNSDEQLC

SEQ ID NO: 118 - protein, 35 aa, Artificial Sequence
  human LDL-receptor class A domain
CSSSAFTCGHGECIPAHWRCDKRNDCVDGSDEHNC

SEQ ID NO: 119 - protein, 35 aa, Artificial Sequence
  human LDL-receptor class A domain
CLDTQYTCDNHQCISKNWVCDTDNDCGDGSDEKNC

SEQ ID NO: 120 - protein, 35 aa, Artificial Sequence
  human LDL-receptor class A domain
CQPSQFNCPNHRCIDLSFVCDGDKDCVDGSDEVGC

SEQ ID NO: 121 - protein, 36 aa, Artificial Sequence
  human LDL-receptor class A domain
CTASQFKCASGDKCIGVTNRCDGVFDCSDNSDEAGC

SEQ ID NO: 122 - protein, 37 aa, Artificial Sequence
  human LDL-receptor class A domain
CHSDEFQCQEDGICIPNFWECDGHPDCLYGSDEHNAC

SEQ ID NO: 123 - protein, 35 aa, Artificial Sequence
  human LDL-receptor class A domain
CPSSYFHCDNGNCIHRAWLCDRDNDCGDMSDEKDC

SEQ ID NO: 124 - protein, 37 aa, Artificial Sequence
  human LDL-receptor class A domain
CPSWQWQCLGHNICVNLSVVCDGIFDCPNGTDESPLC

SEQ ID NO: 125 - protein, 37 aa, Artificial Sequence
  human LDL-receptor class A domain
CGASSFTCSNGRCISEEWKCDNDNDCGDGSDEMESVC

SEQ ID NO: 126 - protein, 35 aa, Artificial Sequence
  human LDL-receptor class A domain
CSPTAFTCANGRCVQYSYRCDYYNDCGDGSDEAGC

SEQ ID NO: 127 - protein, 38 aa, Artificial Sequence
  human LDL-receptor class A domain
CNATTEFMCNNRRCIPREFICNGVDNCHDNNTSDEKNC

SEQ ID NO: 128 - protein, 38 aa, Artificial Sequence
  human LDL-receptor class A domain
CQSGYTKCHNSNICIPRVYLCDGDNDCGDNSDENPTYC

SEQ ID NO: 129 - protein, 36 aa, Artificial Sequence
  human LDL-receptor class A domain
CSSSEFQCASGRCIPQHWYCDQETDCFDASDEPASC

SEQ ID NO: 130 - protein, 38 aa, Artificial Sequence
  human LDL-receptor class A domain
CLADEFKCDGGRCIPSEWICDGDNDCGDMSDEDKRHQC

SEQ ID NO: 131 - protein, 41 aa, Artificial Sequence
  human LDL-receptor class A domain
CSDSEFLCVNDRPPDRRCIPQSWVCDGDVDCTDGYDENQNC

SEQ ID NO: 132 - protein, 35 aa, Artificial Sequence
  human LDL-receptor class A domain
CSENEFTCGYGLCIPKIFRCDRHNDCGDYSDERGC

SEQ ID NO: 133 - protein, 37 aa, Artificial Sequence
  human LDL-receptor class A domain
CQQNQFTCQNGRCISKTFVCDEDNDCGDGSDELMHLC

SEQ ID NO: 134 - protein, 35 aa, Artificial Sequence
  human LDL-receptor class A domain
CPPHEFKCDNGRCIEMMKLCNHLDDCLDNSDEKGC

SEQ ID NO: 135 - protein, 37 aa, Artificial Sequence
  human LDL-receptor class A domain
CSSTQFLCANNEKCIPIWWKCDGQKDCSDGSDELALC

SEQ ID NO: 136 - protein, 37 aa, Artificial Sequence
  human LDL-receptor class A domain
CRLGQFQCSDGNCTSPQTLCNAHQNCPDGSDEDRLLC

SEQ ID NO: 137 - protein, 37 aa, Artificial Sequence
  human LDL-receptor class A domain
CDSNEWQCANKRCIPESWQCDTFNDCEDNSDEDSSHC

SEQ ID NO: 138 - protein, 37 aa, Artificial Sequence
  human LDL-receptor class A domain
CRPGQFRCANGRCIPQAWKCDVDNDCGDHSDEPIEEC

SEQ ID NO: 139 - protein, 37 aa, Artificial Sequence
  human LDL-receptor class A domain
CDNFTEFSCKTNYRCIPKWAVCNGVDDCRDNSDEQGC

SEQ ID NO: 140 - protein, 36 aa, Artificial Sequence
  human LDL-receptor class A domain
CHPVGDFRCKNHHCIPLRWQCDGQNDCGDNSDEENC

SEQ ID NO: 141 - protein, 35 aa, Artificial Sequence
  human LDL-receptor class A domain
CTESEFRCVNQQCIPSRWICDHYNDCGDNSDERDC

SEQ ID NO: 142 - protein, 35 aa, Artificial Sequence
  human LDL-receptor class A domain
CHPEYFQCTSGHCVHSELKCDGSADCLDASDEADC

SEQ ID NO: 143 - protein, 37 aa, Artificial Sequence
  human LDL-receptor class A domain
CQATMFECKNHVCIPPYWKCDGDDDCGDGSDEELHLC

SEQ ID NO: 144 - protein, 38 aa, Artificial Sequence
  human LDL-receptor class A domain
CNSPNRFRCDNNRCIYSHEVCNGVDDCGDGTDETEEHC

SEQ ID NO: 145 - protein, 35 aa, Artificial Sequence
  human LDL-receptor class A domain
CTEYEYKCGNGHCIPHDNVCDDADDCGDWSDELGC

SEQ ID NO: 146 - protein, 38 aa, Artificial Sequence
  human LDL-receptor class A domain
CDPGEFLCHDHVTCVSQSWLCDGDPDCPDDSDESLDTC

SEQ ID NO: 147 - protein, 37 aa, Artificial Sequence
  human LDL-receptor class A domain
CPLNHIACLGTNKCVHLSQLCNGVLDCPDGYDEGVHC

SEQ ID NO: 148 - protein, 37 aa, Artificial Sequence
  human LDL-receptor class A domain
CKAGEFRCKNRHCIQARWKCDGDDDCLDGSDEDSVNC

SEQ ID NO: 149 - protein, 37 aa, Artificial Sequence
  human LDL-receptor class A domain
CPDDQFKCQNNRCIPKRWLCDGANDCGSNEDESNQTC

SEQ ID NO: 150 - protein, 36 aa, Artificial Sequence
  human LDL-receptor class A domain
CQVDQFSCGNGRCIPRAWLCDREDDCGDQTDEMASC

SEQ ID NO: 151 - protein, 36 aa, Artificial Sequence
  human LDL-receptor class A domain
CEPLTQFVCKSGRCISSKWHCDSDDDCGDGSDEVGC

SEQ ID NO: 152 - protein, 37 aa, Artificial Sequence
  human LDL-receptor class A domain
CFDNQFRCSSGRCIPGHWACDGDNDCGDFSDEAQINC

SEQ ID NO: 153 - protein, 36 aa, Artificial Sequence
  human LDL-receptor class A domain
CNGNEFQCHPDGNCVPDLWRCDGEKDCEDGSDEKGC

SEQ ID NO: 154 - protein, 37 aa, Artificial Sequence
  human LDL-receptor class A domain
CDHKTKFSCWSTGRCINKAWVCDGDIDCEDQSDEDDC

SEQ ID NO: 155 - protein, 38 aa, Artificial Sequence
  human LDL-receptor class A domain
CGPPKHPCANDTSVCLQPEKLCNGKKDCPDGSDEGYLC

SEQ ID NO: 156 - protein, 38 aa, Artificial Sequence
  human LDL-receptor class A domain
CNAYSEFECGNGECIDYQLTCDGIPHCKDKSDEKLLYC

SEQ ID NO: 157 - protein, 35 aa, Artificial Sequence
  human LDL-receptor class A domain
CRRGFKPCYNRRCIPHGKLCDGENDCGDNSDELDC

SEQ ID NO: 158 - protein, 35 aa, Artificial Sequence
  human LDL-receptor class A domain
CATVEFRCADGTCIPRSARCNQNIDCADASDEKNC

SEQ ID NO: 159 - protein, 45 aa, Artificial Sequence
  human LDL-receptor class A domain
CTHFYKLGVKTTGFIRCNSTSLCVLPTWICDGSNDCGDYSDELKC

SEQ ID NO: 160 - protein, 35 aa, Artificial Sequence
  human LDL-receptor class A domain
CEENYFSCPSGRCILNTWICDGQKDCEDGRDEFHC

SEQ ID NO: 161 - protein, 37 aa, Artificial Sequence
  human LDL-receptor class A domain
CSWNQFACSAQKCISKHWICDGEDDCGDGLDESDSIC

SEQ ID NO: 162 - protein, 39 aa, Artificial Sequence
  human LDL-receptor class A domain
CAADMFSCQGSRACVPRHWLCDGERDCPDGSDELSTAGC

SEQ ID NO: 163 - protein, 36 aa, Artificial Sequence
  human LDL-receptor class A domain
CDENAFMCHNKVCIPKQFVCDHDDDCGDGSDESPQC

SEQ ID NO: 164 - protein, 40 aa, Artificial Sequence
  human LDL-receptor class A domain
CGTEEFSCADGRCLLNTQWQCDGDFDCPDHSDEAPLNPKC

SEQ ID NO: 165 - protein, 35 aa, Artificial Sequence
  human LDL-receptor class A domain
CNSSFFMCKNGRCIPSGGLCDNKDDCGDGSDERNC

SEQ ID NO: 166 - protein, 36 aa, Artificial Sequence
  human LDL-receptor class A domain
CTASQFRCKTDKCIPFWWKCDTVDDCGDGSDEPDDC

SEQ ID NO: 167 - protein, 35 aa, Artificial Sequence
  human LDL-receptor class A domain
CQPGRFQCGTGLCALPAFICDGENDCGDNSDELNC

SEQ ID NO: 168 - protein, 36 aa, Artificial Sequence
  human LDL-receptor class A domain
CLSGQFKCTKNQKCIPVNLRCNGQDDCGDEEDERDC

SEQ ID NO: 169 - protein, 36 aa, Artificial Sequence
  human LDL-receptor class A domain
CSPDYFQCKTTKHCISKLWVCDEDPDCADASDEANC

SEQ ID NO: 170 - protein, 35 aa, Artificial Sequence
  human LDL-receptor class A domain
CGPHEFQCKNNNCIPDHWRCDSQNDCSDNSDEENC

SEQ ID NO: 171 - protein, 35 aa, Artificial Sequence
  human LDL-receptor class A domain
CTLKDFLCANGDCVSSRFWCDGDFDCADGSDERNC

SEQ ID NO: 172 - protein, 35 aa, Artificial Sequence
  human LDL-receptor class A domain
CSKDQFRCSNGQCIPAKWKCDGHEDCKYGEDEKSC

SEQ ID NO: 173 - protein, 35 aa, Artificial Sequence
  human LDL-receptor class A domain
CSSREYICASDGCISASLKCNGEYDCADGSDEMDC

SEQ ID NO: 174 - protein, 36 aa, Artificial Sequence
  human LDL-receptor class A domain
CKEDQFRCKNKAHCIPIRWLCDGIHDCVDGSDEENC

SEQ ID NO: 175 - protein, 37 aa, Artificial Sequence
  human LDL-receptor class A domain
CRADEFLCNNSLCKLHFWVCDGEDDCGDNSDEAPDMC

SEQ ID NO: 176 - protein, 37 aa, Artificial Sequence
  human LDL-receptor class A domain
CPSTRPHRCRNNRICLQSEQMCNGIDECGDNSDEDHC

SEQ ID NO: 177 - protein, 35 aa, Artificial Sequence
  human LDL-receptor class A domain
CKKDEFACSNKKCIPMDLQCDRLDDCGDGSDEQGC

SEQ ID NO: 178 - protein, 37 aa, Artificial Sequence
  human LDL-receptor class A domain
CAEGEALCQENGHCVPHGWLCDNQDDCGDGSDEEGEC

SEQ ID NO: 179 - protein, 37 aa, Artificial Sequence
  human LDL-receptor class A domain
CGEGQMTCSSGHCLPLALLCDRQDDCGDGTDEPSYPC

SEQ ID NO: 180 - protein, 35 aa, Artificial Sequence
  human LDL-receptor class A domain
CPQGLLACADGRCLPPALLCDGHPDCLDAADEESC

SEQ ID NO: 181 - protein, 37 aa, Artificial Sequence
  human LDL-receptor class A domain
CVPGEVSCVDGTCLGAIQLCDGVWDCPDGADEGPGHC

SEQ ID NO: 182 - protein, 35 aa, Artificial Sequence
  human LDL-receptor class A domain
CGPFEFRCGSGECTPRGWRCDQEEDCADGSDERGC

SEQ ID NO: 183 - protein, 38 aa, Artificial Sequence
  human LDL-receptor class A domain
CAPHHAPCARGPHCVSPEQLCDGVRQCPDGSDEGPDAC

SEQ ID NO: 184 - protein, 36 aa, Artificial Sequence
  human LDL-receptor class A domain
CPGLFPCGVAPGLCLTPEQLCDGIPDCPQGEDELDC

SEQ ID NO: 185 - protein, 39 aa, Artificial Sequence
  human LDL-receptor class A domain
CPEYTCPNGTCIGFQLVCDGQPDCGRPGQVGPSPEEQGC

SEQ ID NO: 186 - protein, 36 aa, Artificial Sequence
  human LDL-receptor class A domain
CEPGVGLRCASGECVLRGGPCDGVLDCEDGSDEEGC

SEQ ID NO: 187 - protein, 35 aa, Artificial Sequence
  human LDL-receptor class A domain
CGPGQTPCEVLGCVEQAQVCDGREDCLDGSDERHC

SEQ ID NO: 188 - protein, 35 aa, Artificial Sequence
  human LDL-receptor class A domain
CSPSQLSCGSGECLSAERRCDLRPDCQDGSDEDGC

SEQ ID NO: 189 - protein, 33 aa, Artificial Sequence
  human LDL-receptor class A domain
CKFTCTSGKCLYLGSLVCNQQNDCGDNSDEENC

SEQ ID NO: 190 - protein, 36 aa, Artificial Sequence
  human LDL-receptor class A domain
CPPTKFQCRTSGLCVPLTWRCDRDLDCSDGSDEEEC

SEQ ID NO: 191 - protein, 36 aa, Artificial Sequence
  human LDL-receptor class A domain
CLAGELRCTLSDDCIPLTWRCDGHPDCPDSSDELGC

SEQ ID NO: 192 - protein, 36 aa, Artificial Sequence
  human LDL-receptor class A domain
CSLGYFPCGNITKCLPQLLHCNGVDDCGNQADEDNC

SEQ ID NO: 193 - protein, 35 aa, Artificial Sequence
  human LDL-receptor class A domain
CAHDEFRCDQLICLLPDSVCDGFANCADGSDETNC

SEQ ID NO: 194 - protein, 34 aa, Artificial Sequence
  human LDL-receptor class A domain
CGPSELSCQAGGCKGVQWMCDMWRDCTDGSDDNC

SEQ ID NO: 195 - protein, 35 aa, Artificial Sequence
  human LDL-receptor class A domain
CSRYHFFCDDGCCIDITLACDGVQQCPDGSDEDFC

SEQ ID NO: 196 - protein, 32 aa, Artificial Sequence
  human LDL-receptor class A domain
CPGEFLCSVNGLCVPACDGVKDCPNGLDERNC

SEQ ID NO: 197 - protein, 35 aa, Artificial Sequence
  human LDL-receptor class A domain
CRATFQCKEDSTCISLPKVCDGQPDCLNGSDEEQC

SEQ ID NO: 198 - protein, 36 aa, Artificial Sequence
  human LDL-receptor class A domain
CGTFTFQCEDRSCVKKPNPQCDGRPDCRDGSDEEHC

SEQ ID NO: 199 - protein, 36 aa, Artificial Sequence
  human LDL-receptor class A domain
CQKGYFPCGNLTKCLPRAFHCDGKDDCGNGADEENC

SEQ ID NO: 200 - protein, 35 aa, Artificial Sequence
  human LDL-receptor class A domain
CSTARYHCKNGLCIDKSFICDGQNNCQDNSDEESC

SEQ ID NO: 201 - protein, 36 aa, Artificial Sequence
  human LDL-receptor class A domain
CGPTFFPCASGIHCIIGRFRCNGFEDCPDGSDEENC

SEQ ID NO: 202 - protein, 36 aa, Artificial Sequence
  human LDL-receptor class A domain
CNIPGNFMCSNGRCIPGAWQCDGLPDCFDKSDEKEC

SEQ ID NO: 203 - protein, 38 aa, Artificial Sequence
  human LDL-receptor class A domain
CALDQFLCWNGRCIGQRKLCNGVNDCGDNSDESPQQNC

SEQ ID NO: 204 - protein, 34 aa, Artificial Sequence
  human LDL-receptor class A domain
CEEDEFPCQNGYCIRSLWHCDGDNDCGDNSDEQC

SEQ ID NO: 205 - protein, 35 aa, Artificial Sequence
  human LDL-receptor class A domain
CRSGEFMCDSGLCINAGWRCDGDADCDDQSDERNC

SEQ ID NO: 206 - protein, 35 aa, Artificial Sequence
  human LDL-receptor class A domain
CTAEQFRCHSGRCVRLSWRCDGEDDCADNSDEENC

SEQ ID NO: 207 - protein, 35 aa, Artificial Sequence
  human LDL-receptor class A domain
CSPLDFHCDNGKCIRRSWVCDGDNDCEDDSDEQDC

SEQ ID NO: 208 - protein, 35 aa, Artificial Sequence
  human LDL-receptor class A domain
CNLEEFQCAYGRCILDIYHCDGDDDCGDWSDESDC

SEQ ID NO: 209 - protein, 35 aa, Artificial Sequence
  human LDL-receptor class A domain
CSDKEFRCSDGSCIAEHWYCDGDTDCKDGSDEENC

SEQ ID NO: 210 - protein, 40 aa, Artificial Sequence
  human LDL-receptor class A domain
CGRSHFTCAVSALGECTCIPAQWQCDGDNDCGDHSDEDGC

SEQ ID NO: 211 - protein, 35 aa, Artificial Sequence
  human LDL-receptor class A domain
CLQEEFQCLNHRCVSAVQRCDGVDACGDGSDEAGC

SEQ ID NO: 212 - protein, 41 aa, Artificial Sequence
  human LDL-receptor class A domain
CPPGHFPCGAAGTSGATACYLPADRCNYQTFCADGADERRC

SEQ ID NO: 213 - protein, 35 aa, Artificial Sequence
  human LDL-receptor class A domain
CQPGNFRCRDEKCVYETWVCDGQPDCADGSDEWDC

SEQ ID NO: 214 - protein, 36 aa, Artificial Sequence
  human LDL-receptor class A domain
CPEITDFLCRDKKCIASHLLCDYKPDCSDRSDEAHC

SEQ ID NO: 215 - protein, 36 aa, Artificial Sequence
  human LDL-receptor class A domain
CNNRTFKCGNDICFRKQNAKCDGTVDCPDGSDEEGC

SEQ ID NO: 216 - protein, 37 aa, Artificial Sequence
  human LDL-receptor class A domain
CPPGHHHCQNKVCVEPQQLCDGEDNCGDLSDENPLTC

SEQ ID NO: 217 - protein, 34 aa, Artificial Sequence
  human LDL-receptor class A domain
CKQGHLACGDLCVPPEQLCDFEEQCAGGEDEQAC

SEQ ID NO: 218 - protein, 36 aa, Artificial Sequence
  human LDL-receptor class A domain
CPGNSFSCGNSQCVTKVNPECDDQEDCSDGSDEAHC

SEQ ID NO: 219 - protein, 4 aa, Artificial Sequence
  beta-Propeller domain repeated sequence
YWTD

SEQ ID NO: 220 - protein, 64 aa, Artificial Sequence
  LDL receptor class A domain monomer sequence
  MOD_RES (2)...(16): Xaa = any amino acid, Xaa at positions 5-16 may be present or absent
  MOD_RES (18)...(32): Xaa = any amino acid, Xaa at positions 21-32 may be present or absent
  MOD_RES (34)...(40): Xaa = any amino acid, Xaa at position 40 may be present or absent
  MOD_RES (43)...(46): Xaa = any amino acid
  MOD_RES (48)...(53): Xaa = any amino acid, Xaa at positions 52-53 may be present or absent
  MOD_RES (56)...(63): Xaa = any amino acid, Xaa at positions 58-63 may be present or absent
  DISULFID (1)...(33)
  DISULFID (17)...(47)
  DISULFID (41)...(64)
CXXXXXXXXXXXXXXXCXXXXXXXXXXXXXXXCXXXXXXXCXXXXXCXXXXXXDEXXXXXXXXC

SEQ ID NO: 221 - protein, 35 aa, Artificial Sequence
  LDL receptor class A domain monomer sequence
  MOD_RES (2)...(2): Xaa = Ala, Asp, Glu, Phe, Gly, His, Lys, Leu, Met, Asn, Pro, Gln, Arg, Ser, Thr or Val
  MOD_RES (3)...(3): Xaa = Ala, Cys, Asp, Glu, Gly, His, Ile, Lys, Leu, Met, Asn, Pro, Gln, Arg, Ser, Thr, Val, Trp or Tyr
  MOD_RES (4)...(4): Xaa = Ala, Asp, Glu, Phe, Gly, His, Lys, Leu, Met, Asn, Gln, Arg, Ser, Thr or Tyr
  MOD_RES (5)...(5): Xaa = Ala, Phe, His, Ile, Lys, Leu, Met, Gln, Arg, Ser, Thr, Val, Trp or Tyr
  MOD_RES (6)...(6): Xaa = Ala, Glu, Phe, His, Ile, Lys, Leu, Met, Asn, Pro, Gln, Arg, Ser, Thr or Val
  MOD_RES (9)...(9): Xaa = Ala, Asp, Glu, Phe, Gly, His, Lys, Leu, Asn, Pro, Gln, Arg, Ser, Thr, Val or Tyr
  MOD_RES (10)...(10): Xaa = Ala, Asp, Gly, His, Asn, Gln, Arg, Ser, Thr, Val or Tyr
  MOD_RES (11)...(11): Xaa = Asp, Glu, Gly, His, Lys, Leu, Asn, Gln, Arg, Ser or Thr
  MOD_RES (12)...(12): Xaa = Ala, Cys, Asp, Glu, Phe, Gly, His, Ile, Lys, Leu, Met, Asn, Gln, Arg, Ser, Thr or Val
  MOD_RES (14)...(14): Xaa = Ala, Phe, Ile, Lys, Leu, Thr, Val or Tyr
  MOD_RES (15)...(15): Xaa = Ala, Asp, Glu, Phe, Gly, His, Lys, Leu, Met, Asn, Pro, Gln, Arg, Ser, Thr, Val, Trp or Tyr
  MOD_RES (16)...(16): Xaa = Ala, Asp, Glu, Phe, Gly, His, Ile, Lys, Leu, Met, Asn, Pro, Gln, Arg, Ser, Thr, Val, Trp or Tyr
  MOD_RES (17)...(17): Xaa = Ala, Asp, Glu, Phe, Gly, His, Ile, Lys, Leu, Met, Asn, Pro, Gln, Arg, Ser, Thr, Val, Trp or Tyr
  MOD_RES (18)...(18): Xaa = Ala, Asp, Glu, Phe, Gly, Lys, Met, Asn, Gln, Arg, Ser, Thr, Val, Trp or Tyr
  MOD_RES (19)...(19): Xaa = Ala, Glu, Phe, His, Ile, Lys, Leu, Met, Pro, Gln, Arg, Thr, Val, Trp or Tyr
  MOD_RES (22)...(22): Xaa = Ala, Asp, Glu, Phe, Gly, His, Lys, Met, Asn, Gln, Arg, Ser, Thr, Val, Trp or Tyr
  MOD_RES (23)...(23): Xaa = Ala, Asp, Glu, Phe, Gly, His, Ile, Lys, Leu, Met, Asn, Gln, Arg, Ser, Thr, Val, Trp or Tyr
  MOD_RES (24)...(24): Xaa = Ala, Asp, Glu, Phe, His, Ile, Lys, Leu, Asn, Pro, Gln, Arg, Ser, Thr, Val, Trp or Tyr
  MOD_RES (24)...(24): Xaa = Ala, Asp, Glu, Phe, His, Ile, Lys, Leu, Asn, Pro, Gln, Arg, Ser, Thr, Val, Trp or Tyr
  MOD_RES (25)...(25): Xaa = Asp, Glu, His, Asn, Gln, Ser or Thr
  MOD_RES (27)...(27): Xaa = Ala, Asp, Glu, Gly, His, Ile, Lys, Leu, Met, Pro, Gln, Arg, Ser, Thr or Val
  MOD_RES (28)...(28): Xaa = Asp, Gly, His, Asn, Gln, Ser, Thr or Tyr
  MOD_RES (29)...(29): Xaa = Ala, Asp, Glu, Phe, Gly, His, Lys, Leu, Met, Asn, Gln, Arg, Ser, Trp or Tyr
  MOD_RES (30)...(30): Xaa = Ala, Glu, Gly, Leu, Met, Arg, Ser or Thr
  MOD_RES (33)...(33): Xaa = Ala, Asp, Glu, Phe, Gly, His, Ile, Lys, Leu, Met, Asn, Gln, Arg, Ser, Thr, Val, Trp or Tyr
  MOD_RES (34)...(34): Xaa = Ala, Asp, Glu, Phe, Gly, His, Ile, Lys, Leu, Met, Asn, Pro, Gln, Arg or Ser
CXXXXXXCXXXXCXXXXXXCXXXXXCXXXXDEXXC

SEQ ID NO: 222 - protein, 36 aa, Artificial Sequence
  LDL receptor class A domain monomer sequence
  MOD_RES (2)...(2): Xaa = Ala, Asp, Glu, Phe, Gly, His, Lys, Leu, Met, Asn, Pro, Gln, Arg, Ser, Thr or Val
  MOD_RES (3)...(3): Xaa = Ala, Cys, Asp, Glu, Gly, His, Ile, Lys, Leu, Met, Asn, Pro, Gln, Arg, Ser, Thr, Val, Trp or Tyr
  MOD_RES (4)...(4): Xaa = Ala, Asp, Glu, Phe, Gly, His, Lys, Asn, Pro, Gln, Arg, Ser, Thr, Val, Trp or Tyr
  MOD_RES (5)...(5): Xaa = Ala, Asp, Glu, Phe, Gly, His, Lys, Leu, Met, Asn, Gln, Arg, Ser, Thr or Tyr
  MOD_RES (6)...(6): Xaa = Ala, Phe, His, Ile, Lys, Leu, Met, Gln, Arg, Ser, Thr, Val, Trp or Tyr
  MOD_RES (7)...(7): Xaa = Ala, Glu, Phe, His, Ile, Lys, Leu, Met, Asn, Pro, Gln, Arg, Ser, Thr or Val
  MOD_RES (9)...(9): Xaa = Ala, Asp, Glu, Phe, Gly, His, Lys, Leu, Asn, Pro, Gln, Arg, Ser, Thr, Val or Tyr
  MOD_RES (10)...(10): Xaa = Ala, Asp, Gly, His, Asn, Gln, Arg, Ser, Thr, Val or Tyr
  MOD_RES (11)...(11): Xaa = Asp, Glu, Gly, His, Lys, Leu, Asn, Gln, Arg, Ser or Thr
  MOD_RES (12)...(12): Xaa = Ala, Cys, Asp, Glu, Phe, Gly, His, Ile, Lys, Leu, Met, Asn, Gln, Arg, Ser, Thr or Val
  MOD_RES (14)...(14): Xaa = Ala, Phe, Ile, Lys, Leu, Thr, Val or Tyr
  MOD_RES (15)...(15): Xaa = Ala, Asp, Glu, Phe, Gly, His, Lys, Leu, Met, Asn, Pro, Gln, Arg, Ser, Thr, Val, Trp or Tyr
  MOD_RES (16)...(16): Xaa = Ala, Asp, Glu, Phe, Gly, His, Ile, Lys, Leu, Met, Asn, Pro, Gln, Arg, Ser, Thr, Val, or Tyr
  MOD_RES (17)...(17): Xaa = Ala, Asp, Glu, Phe, Gly, His, Ile, Lys, Leu, Met, Asn, Pro, Gln, Arg, Ser, Thr, Val, Trp or Tyr
  MOD_RES (18)...(18): Xaa = Ala, Asp, Glu, Phe, Gly, Lys, Leu, Met, Asn, Gln, Arg, Ser, Thr, Val, Trp or Tyr
  MOD_RES (19)...(19): Xaa = Ala, Glu, Phe, His, Ile, Lys, Leu, Met, Pro, Gln, Arg, Thr, Val, Trp or Tyr
  MOD_RES (22)...(22): Xaa = Ala, Asp, Glu, Phe, Gly, His, Lys, Leu, Met, Asn, Gln, Arg, Ser, Thr, Val, Trp or Tyr
  MOD_RES (23)...(23): Xaa = Ala, Asp, Glu, Phe, Gly, His, Ile, Lys, Leu, Met, Asn, Gln, Arg, Ser, Thr, Val, Trp or Tyr
  MOD_RES (24)...(24): Xaa = Ala, Asp, Glu, Phe, His, Ile, Lys, Leu, Asn, Pro, Gln, Arg, Ser, Thr, Val, Trp or Tyr
  MOD_RES (25)...(25): Xaa = Asp, Glu, His, Asn, Gln, Ser or Thr
  MOD_RES (27)...(27): Xaa = Ala, Asp, Phe, Gly, Leu, Met, Pro, Ser, Thr or Val
  MOD_RES (29)...(29): Xaa = Ala, Gly, His, Gln or Arg
  MOD_RES (30)...(30): Xaa = Ser, Thr or Tyr
  MOD_RES (33)...(33): Xaa = Ala, Glu, Gly, His, Leu, Met, Asn, Pro, Arg or Ser
  MOD_RES (34)...(34): Xaa = Ala, Asp, Glu, Gly, Asn, Pro, Gln, Val or Tyr
  MOD_RES (35)...(35): Xaa = Ala, Asp, Glu, His, Leu, Asn, Gln or Ser
CXXXXXXCXXXXCXXXXXXCXXXXXCXXXXDEXXXC

SEQ ID NO: 223 - protein, 37 aa, Artificial Sequence
  LDL receptor class A domain monomer sequence
  MOD_RES (2)...(2): Xaa = Ala, Asp, Glu, Phe, Gly, His, Lys, Leu, Met, Asn, Pro, Gln, Arg, Ser, Thr or Val
  MOD_RES (3)...(3): Xaa = Ala, Cys, Asp, Glu, Gly, His, Ile, Lys, Leu, Met, Asn, Pro, Gln, Arg, Ser, Thr, Val, Trp or Tyr
  MOD_RES (4)...(4): Xaa = Ala, Asp, Glu, Phe, Gly, His, Lys, Asn, Pro, Gln, Arg, Ser, Thr, Val, Trp or Tyr
  MOD_RES (5)...(5): Xaa = Ala, Asp, Glu, Phe, Gly, His, Lys, Leu, Met, Asn, Gln, Arg, Ser, Thr or Tyr
  MOD_RES (6)...(6): Xaa = Ala, Phe, His, Ile, Lys, Leu, Met, Gln, Arg, Ser, Thr, Val, Trp or Tyr
  MOD_RES (7)...(7): Xaa = Ala, Glu, Phe, His, Ile, Lys, Leu, Met, Asn, Pro, Gln, Arg, Ser, Thr or Val
  MOD_RES (9)...(9): Xaa = Ala, Asp, Glu, Phe, Gly, His, Lys, Leu, Asn, Pro, Gln, Arg, Ser, Thr, Val or Tyr
  MOD_RES (10)...(10): Xaa = Ala, Asp, Gly, His, Asn, Gln, Arg, Ser, Thr, Val or Tyr
  MOD_RES (11)...(11): Xaa = Asp, Glu, Gly, His, Lys, Leu, Asn, Gln, Arg, Ser or Thr
  MOD_RES (12)...(12): Xaa = Ala, Cys, Asp, Glu, Phe, Gly, His, Ile, Lys, Leu, Met, Asn, Gln, Arg, Ser, Thr or Val
  MOD_RES (14)...(14): Xaa = Ala, Phe, Ile, Lys, Leu, Thr, Val or Tyr
  MOD_RES (15)...(15): Xaa = Ala, Asp, Glu, Phe, Gly, His, Lys, Leu, Met, Asn, Pro, Gln, Arg, Ser, Thr, Val, Trp or Tyr
  MOD_RES (16)...(16): Xaa = Ala, Asp, Glu, Phe, Gly, His, Ile, Lys, Leu, Met, Asn, Pro, Gln, Arg, Ser, Thr, Val, or Tyr
  MOD_RES (17)...(17): Xaa = Ala, Asp, Glu, Phe, Gly, His, Ile, Lys, Leu, Met, Asn, Pro, Gln, Arg, Ser, Thr, Val, Trp or Tyr
  MOD_RES (18)...(18): Xaa = Ala, Asp, Glu, Phe, Gly, Lys, Leu, Met, Asn, Gln, Arg, Ser, Thr, Val, Trp or Tyr
  MOD_RES (19)...(19): Xaa = Ala, Glu, Phe, His, Ile, Lys, Leu, Met, Pro, Gln, Arg, Thr, Val, Trp or Tyr
  MOD_RES (22)...(22): Xaa = Ala, Asp, Glu, Phe, Gly, His, Lys, Leu, Met, Asn, Gln, Arg, Ser, Thr, Val, Trp or Tyr
  MOD_RES (23)...(23): Xaa = Ala, Asp, Glu, Phe, Gly, His, Ile, Lys, Leu, Met, Asn, Gln, Arg, Ser, Thr, Val, Trp or Tyr
  MOD_RES (24)...(24): Xaa = Ala, Asp, Glu, Phe, His, Ile, Lys, Leu, Asn, Pro, Gln, Arg, Ser, Thr, Val, Trp or Tyr
  MOD_RES (25)...(25): Xaa = Asp, Glu, His, Asn, Gln, Ser or Thr
  MOD_RES (27)...(27): Xaa = Glu, Gly, Lys, Leu, Pro, Gln, Arg or Ser
  MOD_RES (28)...(28): Xaa = Asp, Asn or Ser
  MOD_RES (29)...(29): Xaa = Asp, Phe, Gly, His, Lys, Asn, Gln, Arg, Ser, Trp or Tyr
  MOD_RES (30)...(30): Xaa = Ala, Glu, Leu, Ser or Thr
  MOD_RES (33)...(33): Xaa = Ala, Asp, Glu, Gly, Lys, Leu, Met, Asn, Pro, Ser, Thr or Trp
  MOD_RES (34)...(34): Xaa = Ala, Asp, Glu, His, Ile, Lys, Leu, Met, Asn, Pro, Gln, Arg or Ser
  MOD_RES (35)...(35): Xaa = Ala, Asp, Glu, Gly, His, Ile, Lys, Leu, Gln, Ser, Thr, Val or Tyr
  MOD_RES (36)...(36): Xaa = Ala, Glu, His, Ile, Leu, Met, Asn, Pro, Gln, Arg, Thr, Val or Tyr
CXXXXXXCXXXXCXXXXXXCXXXXXCXXXXDEXXXXC

SEQ ID NO: 224 - protein, 36 aa, Artificial Sequence
  LDL receptor class A domain monomer sequence
  MOD_RES (2)...(2): Xaa = Ala, Asp, Glu, Phe, Gly, His, Lys, Leu, Asn, Pro, Arg, Ser or Thr
  MOD_RES (3)...(3): Xaa = Ala, Asp, Glu, Gly, His, Leu, Asn, Pro, Arg, Ser or Thr
  MOD_RES (4)...(4): Xaa = Asp, Phe, Gly, Lys, Leu, Asn, Pro, Gln, Arg, Ser, Thr, Val or Tyr
  MOD_RES (5)...(5): Xaa = Asp, Glu, Phe, Gly, His, Lys, Met, Asn, Arg, Ser, Thr or Val
  MOD_RES (6)...(6): Xaa = Asp, Glu, Gly, Lys, Leu, Asn, Pro, Gln or Arg
  MOD_RES (7)...(7): Xaa = Phe, His, Leu, Val or Trp
  MOD_RES (8)...(8): Xaa = Ala, Glu, Gly, Lys, Leu, Met, Arg, Ser, Thr or Val
  MOD_RES (10)...(10): Xaa = Ala, Asp, Glu, Phe, Gly, His, Lys, Leu, Asn, Pro, Gln, Arg, Ser, Thr, Val or Tyr
  MOD_RES (11)...(11): Xaa = Ala, Asp, Gly, His, Asn, Gln, Arg, Ser, Thr, Val or Tyr
  MOD_RES (12)...(12): Xaa = Asp, Glu, Gly, His, Lys, Leu, Asn, Gln, Arg, Ser or Thr
  MOD_RES (13)...(13): Xaa = Ala, Cys, Asp, Glu, Phe, Gly, His, Ile, Lys, Leu, Met, Asn, Gln, Arg, Ser, Thr or Val
  MOD_RES (15)...(15): Xaa = Ala, Phe, Ile, Lys, Leu, Thr, Val or Tyr
  MOD_RES (16)...(16): Xaa = Ala, Asp, Glu, Phe, Gly, His, Lys, Leu, Met, Asn, Pro, Gln, Arg, Ser, Thr, Val, Trp or Tyr
  MOD_RES (17)...(17): Xaa = Ala, Asp, Glu, Phe, Gly, His, Ile, Lys, Leu, Met, Asn, Pro, Gln, Arg, Ser, Thr, Val, or Tyr
  MOD_RES (18)...(18): Xaa = Ala, Asp, Glu, Phe, Gly, His, Ile, Lys, Leu, Met, Asn, Pro, Gln, Arg, Ser, Thr, Val, Trp or Tyr
  MOD_RES (19)...(19): Xaa = Ala, Asp, Glu, Phe, Gly, Lys, Leu, Met, Asn, Gln, Arg, Ser, Thr, Val, Trp or Tyr
  MOD_RES (20)...(20): Xaa = Ala, Glu, Phe, His, Ile, Lys, Leu, Met, Pro, Gln, Arg, Thr, Val, Trp or Tyr
  MOD_RES (23)...(23): Xaa = Ala, Asp, Glu, Phe, Gly, His, Lys, Leu, Met, Asn, Gln, Arg, Ser, Thr, Val, Trp or Tyr
  MOD_RES (24)...(24): Xaa = Ala, Asp, Glu, Phe, Gly, His, Ile, Lys, Leu, Met, Asn, Gln, Arg, Ser, Thr, Val, Trp or Tyr
  MOD_RES (25)...(25): Xaa = Ala, Asp, Glu, Phe, His, Ile, Lys, Leu, Asn, Pro, Gln, Arg, Ser, Thr, Val, Trp or Tyr
  MOD_RES (26)...(26): Xaa = Asp, Glu, His, Asn, Gln, Ser or Thr
  MOD_RES (28)...(28): Xaa = Ala, Asp, Glu, Gly, His, Ile, Lys, Leu, Met, Pro, Gln, Arg, Ser, Thr or Val
  MOD_RES (29)...(29): Xaa = Asp, Gly, His, Asn, Gln, Ser, Thr or Tyr
  MOD_RES (30)...(30): Xaa = Ala, Asp, Glu, Phe, Gly, His, Lys, Leu, Met, Asn, Gln, Arg, Ser, Trp or Tyr
  MOD_RES (31)...(31): Xaa = Ala, Glu, Gly, Leu, Met, Arg, Ser or Thr
  MOD_RES (34)...(34): Xaa = Ala, Asp, Glu, Phe, Gly, His, Ile, Lys, Leu, Met, Asn, Gln, Arg, Ser, Thr, Val, Trp or Tyr
  MOD_RES (35)...(35): Xaa = Ala, Asp, Glu, Phe, Gly, His, Ile, Lys, Leu, Met, Asn, Pro, Gln, Arg or Ser
CXXXXXXXCXXXXCXXXXXXCXXXXXCXXXXDEXXC

SEQ ID NO: 225 - protein, 37 aa, Artificial Sequence
  LDL receptor class A domain monomer sequence
  MOD_RES (2)...(2): Xaa = Ala, Asp, Glu, Phe, Gly, His, Lys, Leu, Asn, Pro, Arg, Ser or Thr
  MOD_RES (3)...(3): Xaa = Ala, Asp, Glu, Gly, His, Leu, Asn, Pro, Arg, Ser or Thr
  MOD_RES (4)...(4): Xaa = Asp, Phe, Gly, Lys, Leu, Asn, Pro, Gln, Arg, Ser, Thr, Val or Tyr
  MOD_RES (5)...(5): Xaa = Asp, Glu, Phe, Gly, His, Lys, Met, Asn, Arg, Ser, Thr or Val
  MOD_RES (6)...(6): Xaa = Asp, Glu, Gly, Lys, Leu, Asn, Pro, Gln or Arg
  MOD_RES (7)...(7): Xaa = Phe, His, Leu, Val or Trp
  MOD_RES (8)...(8): Xaa = Ala, Glu, Gly, Lys, Leu, Met, Arg, Ser, Thr or Val
  MOD_RES (10)...(10): Xaa = Ala, Asp, Glu, Phe, Gly, His, Lys, Leu, Asn, Pro, Gln, Arg, Ser, Thr, Val or Tyr
  MOD_RES (11)...(11): Xaa = Ala, Asp, Gly, His, Asn, Gln, Arg, Ser, Thr, Val or Tyr
  MOD_RES (12)...(12): Xaa = Asp, Glu, Gly, His, Lys, Leu, Asn, Gln, Arg, Ser or Thr
  MOD_RES (13)...(13): Xaa = Ala, Cys, Asp, Glu, Phe, Gly, His, Ile, Lys, Leu, Met, Asn, Gln, Arg, Ser, Thr or Val
  MOD_RES (15)...(15): Xaa = Ala, Phe, Ile, Lys, Leu, Thr, Val or Tyr
  MOD_RES (16)...(16): Xaa = Ala, Asp, Glu, Phe, Gly, His, Lys, Leu, Met, Asn, Pro, Gln, Arg, Ser, Thr, Val, Trp or Tyr
  MOD_RES (17)...(17): Xaa = Ala, Asp, Glu, Phe, Gly, His, Ile, Lys, Leu, Met, Asn, Pro, Gln, Arg, Ser, Thr, Val, or Tyr
  MOD_RES (18)...(18): Xaa = Ala, Asp, Glu, Phe, Gly, His, Ile, Lys, Leu, Met, Asn, Pro, Gln, Arg, Ser, Thr, Val, Trp or Tyr
  MOD_RES (19)...(19): Xaa = Ala, Asp, Glu, Phe, Gly, Lys, Leu, Met, Asn, Gln, Arg, Ser, Thr, Val, Trp or Tyr
  MOD_RES (20)...(20): Xaa = Ala, Glu, Phe, His, Ile, Lys, Leu, Met, Pro, Gln, Arg, Thr, Val, Trp or Tyr
  MOD_RES (23)...(23): Xaa = Ala, Asp, Glu, Phe, Gly, His, Lys, Leu, Met, Asn, Gln, Arg, Ser, Thr, Val, Trp or Tyr
  MOD_RES (24)...(24): Xaa = Ala, Asp, Glu, Phe, Gly, His, Ile, Lys, Leu, Met, Asn, Gln, Arg, Ser, Thr, Val, Trp or Tyr
  MOD_RES (25)...(25): Xaa = Ala, Asp, Glu, Phe, His, Ile, Lys, Leu, Asn, Pro, Gln, Arg, Ser, Thr, Val, Trp or Tyr
  MOD_RES (26)...(26): Xaa = Asp, Glu, His, Asn, Gln, Ser or Thr
  MOD_RES (28)...(28): Xaa = Ala, Asp, Phe, Gly, Leu, Met, Pro, Ser, Thr or Val
  MOD_RES (30)...(30): Xaa = Ala, Gly, His, Gln or Arg
  MOD_RES (31)...(31): Xaa = Ser, Thr or Tyr
  MOD_RES (34)...(34): Xaa = Ala, Glu, Gly, His, Leu, Met, Asn, Pro, Arg or Ser
  MOD_RES (35)...(35): Xaa = Ala, Asp, Glu, Gly, Asn, Pro, Gln, Val or Tyr
  MOD_RES (36)...(36): Xaa = Ala, Asp, Glu, His, Leu, Asn, Gln or Ser
CXXXXXXXCXXXXCXXXXXXCXXXXXCXXXXDEXXXC

SEQ ID NO: 226 - protein, 37 aa, Artificial Sequence; identical to SEQ ID NO: 225
  LDL receptor class A domain monomer sequence
  MOD_RES (2)...(2): Xaa = Ala, Asp, Glu, Phe, Gly, His, Lys, Leu, Asn, Pro, Arg, Ser or Thr
  MOD_RES (3)...(3): Xaa = Ala, Asp, Glu, Gly, His, Leu, Asn, Pro, Arg, Ser or Thr
  MOD_RES (4)...(4): Xaa = Asp, Phe, Gly, Lys, Leu, Asn, Pro, Gln, Arg, Ser, Thr, Val or Tyr
  MOD_RES (5)...(5): Xaa = Asp, Glu, Phe, Gly, His, Lys, Met, Asn, Arg, Ser, Thr or Val
  MOD_RES (6)...(6): Xaa = Asp, Glu, Gly, Lys, Leu, Asn, Pro, Gln or Arg
  MOD_RES (7)...(7): Xaa = Phe, His, Leu, Val or Trp
  MOD_RES (8)...(8): Xaa = Ala, Glu, Gly, Lys, Leu, Met, Arg, Ser, Thr or Val
  MOD_RES (10)...(10): Xaa = Ala, Asp, Glu, Phe, Gly, His, Lys, Leu, Asn, Pro, Gln, Arg, Ser, Thr, Val or Tyr
  MOD_RES (11)...(11): Xaa = Ala, Asp, Gly, His, Asn, Gln, Arg, Ser, Thr, Val or Tyr
  MOD_RES (12)...(12): Xaa = Asp, Glu, Gly, His, Lys, Leu, Asn, Gln, Arg, Ser or Thr
  MOD_RES (13)...(13): Xaa = Ala, Cys, Asp, Glu, Phe, Gly, His, Ile, Lys, Leu, Met, Asn, Gln, Arg, Ser, Thr or Val
  MOD_RES (15)...(15): Xaa = Ala, Phe, Ile, Lys, Leu, Thr, Val or Tyr
  MOD_RES (16)...(16): Xaa = Ala, Asp, Glu, Phe, Gly, His, Lys, Leu, Met, Asn, Pro, Gln, Arg, Ser, Thr, Val, Trp or Tyr
  MOD_RES (17)...(17): Xaa = Ala, Asp, Glu, Phe, Gly, His, Ile, Lys, Leu, Met, Asn, Pro, Gln, Arg, Ser, Thr, Val, or Tyr
  MOD_RES (18)...(18): Xaa = Ala, Asp, Glu, Phe, Gly, His, Ile, Lys, Leu, Met, Asn, Pro, Gln, Arg, Ser, Thr, Val, Trp or Tyr
  MOD_RES (19)...(19): Xaa = Ala, Asp, Glu, Phe, Gly, Lys, Leu, Met, Asn, Gln, Arg, Ser, Thr, Val, Trp or Tyr
  MOD_RES (20)...(20): Xaa = Ala, Glu, Phe, His, Ile, Lys, Leu, Met, Pro, Gln, Arg, Thr, Val, Trp or Tyr
  MOD_RES (23)...(23): Xaa = Ala, Asp, Glu, Phe, Gly, His, Lys, Leu, Met, Asn, Gln, Arg, Ser, Thr, Val, Trp or Tyr
  MOD_RES (24)...(24): Xaa = Ala, Asp, Glu, Phe, Gly, His, Ile, Lys, Leu, Met, Asn, Gln, Arg, Ser, Thr, Val, Trp or Tyr
  MOD_RES (25)...(25): Xaa = Ala, Asp, Glu, Phe, His, Ile, Lys, Leu, Asn, Pro, Gln, Arg, Ser, Thr, Val, Trp or Tyr
  MOD_RES (26)...(26): Xaa = Asp, Glu, His, Asn, Gln, Ser or Thr
  MOD_RES (28)...(28): Xaa = Glu, Gly, Lys, Leu, Pro, Gln, Arg or Ser
  MOD_RES (29)...(29): Xaa = Asp, Asn or Ser
  MOD_RES (30)...(30): Xaa = Asp, Phe, Gly, His, Lys, Asn, Gln, Arg, Ser, Trp or Tyr
  MOD_RES (31)...(31): Xaa = Ala, Glu, Leu, Ser or Thr
  MOD_RES (34)...(34): Xaa = Ala, Asp, Glu, Gly, Lys, Leu, Met, Asn, Pro, Ser, Thr or Trp
  MOD_RES (35)...(35): Xaa = Ala, Asp, Glu, His, Ile, Lys, Leu, Met, Asn, Pro, Gln, Arg or Ser
  MOD_RES (36)...(36): Xaa = Ala, Asp, Glu, Gly, His, Ile, Lys, Leu, Gln, Ser, Thr, Val or Tyr
  MOD_RES (37)...(37): Xaa = Ala, Glu, His, Ile, Leu, Met, Asn, Pro, Gln, Arg, Thr, Val or Tyr

SEQ ID NO: 227 - protein, 36 aa, Artificial Sequence
  LDL receptor class A domain monomer sequence
  MOD_RES (2)...(2): Xaa = Ala, Asp, Glu, Phe, Gly, His, Lys, Leu, Met, Asn, Pro, Gln, Arg, Ser, Thr or Val
  MOD_RES (3)...(3): Xaa = Ala, Cys, Asp, Glu, Gly, His, Ile, Lys, Leu, Met, Asn, Pro, Gln, Arg, Ser, Thr, Val, Trp or Tyr
  MOD_RES (4)...(4): Xaa = Ala, Asp, Glu, Phe, Gly, His, Lys, Asn, Pro, Gln, Arg, Ser, Thr, Val, Trp or Tyr
  MOD_RES (5)...(5): Xaa = Ala, Asp, Glu, Phe, Gly, His, Lys, Leu, Met, Asn, Gln, Arg, Ser, Thr or Tyr
  MOD_RES (6)...(6): Xaa = Ala, Phe, His, Ile, Lys, Leu, Met, Gln, Arg, Ser, Thr, Val, Trp or Tyr
  MOD_RES (7)...(7): Xaa = Ala, Glu, Phe, His, Ile, Lys, Leu, Met, Asn, Pro, Gln, Arg, Ser, Thr or Val
  MOD_RES (9)...(9): Xaa = Ala, Asp, Glu, Gly, His, Lys, Leu, Asn, Pro, Gln, Arg, Ser, Thr, Val or Trp
  MOD_RES (10)...(10): Xaa = Asp, Glu, Gly, Ile, Lys, Leu, Asn, Pro, Gln, Arg, Ser, Thr or Val
  MOD_RES (11)...(11): Xaa = Ala, Asp, Glu, Gly, His, Ile, Lys, Asn, Pro, Gln, Arg, Ser, Thr or Tyr
  MOD_RES (12)...(12): Xaa = Ala, Asp, Glu, Phe, Gly, His, Ile, Lys, Leu, Asn, Pro, Gln, Arg, Ser, Thr, Val, Trp or Tyr
  MOD_RES (13)...(13): Xaa = Ala, Asp, Glu, Gly, His, Ile, Lys, Leu, Met, Asn, Gln, Arg, Thr or Val
  MOD_RES (15)...(15): Xaa = Ala, Phe, Ile, Lys, Leu, Thr, Val or Tyr
  MOD_RES (16)...(16): Xaa = Ala, Asp, Glu, Phe, Gly, His, Lys, Leu, Met, Asn, Pro, Gln, Arg, Ser, Thr, Val, Trp or Tyr
  MOD_RES (17)...(17): Xaa = Ala, Asp, Glu, Phe, Gly, His, Ile, Lys, Leu, Met, Asn, Pro, Gln, Arg, Ser, Thr, Val, or Tyr
  MOD_RES (18)...(18): Xaa = Ala, Asp, Glu, Phe, Gly, His, Ile, Lys, Leu, Met, Asn, Pro, Gln, Arg, Ser, Thr, Val, Trp or Tyr
  MOD_RES (19)...(19): Xaa = Ala, Asp, Glu, Phe, Gly, Lys, Leu, Met, Asn, Gln, Arg, Ser, Thr, Val, Trp or Tyr
  MOD_RES (20)...(20): Xaa = Ala, Glu, Phe, His, Ile, Lys, Leu, Met, Pro, Gln, Arg, Thr, Val, Trp or Tyr
  MOD_RES (23)...(23): Xaa = Ala, Asp, Glu, Phe, Gly, His, Lys, Leu, Met, Asn, Gln, Arg, Ser, Thr, Val, Trp or Tyr
  MOD_RES (24)...(24): Xaa = Ala, Asp, Glu, Phe, Gly, His, Ile, Lys, Leu, Met, Asn, Gln, Arg, Ser, Thr, Val, Trp or Tyr
  MOD_RES (25)...(25): Xaa = Ala, Asp, Glu, Phe, His, Ile, Lys, Leu, Asn, Pro, Gln, Arg, Ser, Thr, Val, Trp or Tyr
  MOD_RES (26)...(26): Xaa = Asp, Glu, His, Asn, Gln, Ser or Thr
  MOD_RES (28)...(28): Xaa = Ala, Asp, Glu, Gly, His, Ile, Lys, Leu, Met, Pro, Gln, Arg, Ser, Thr or Val
  MOD_RES (29)...(29): Xaa = Asp, Gly, His, Asn, Gln, Ser, Thr or Tyr
  MOD_RES (30)...(30): Xaa = Ala, Asp, Glu, Phe, Gly, His, Lys, Leu, Met, Asn, Gln, Arg, Ser, Trp or Tyr
  MOD_RES (31)...(31): Xaa = Ala, Glu, Gly, Leu, Met, Arg, Ser or Thr
  MOD_RES (34)...(34): Xaa = Ala, Asp, Glu, Phe, Gly, His, Ile, Lys, Leu, Met, Asn, Gln, Arg, Ser, Thr, Val, Trp or Tyr
  MOD_RES (35)...(35): Xaa = Ala, Asp, Glu, Phe, Gly, His, Ile, Lys, Leu, Met, Asn, Pro, Gln, Arg or Ser
CXXXXXXCXXXXXCXXXXXXCXXXXXCXXXXDEXXC

SEQ ID NO: 228 - protein, 37 aa, Artificial Sequence
  LDL receptor class A domain monomer sequence
  MOD_RES (2)...(2): Xaa = Ala, Asp, Glu, Phe, Gly, His, Lys, Leu, Met, Asn, Pro, Gln, Arg, Ser, Thr or Val
  MOD_RES (3)...(3): Xaa = Ala, Cys, Asp, Glu, Gly, His, Ile, Lys, Leu, Met, Asn, Pro, Gln, Arg, Ser, Thr, Val, Trp or Tyr
  MOD_RES (4)...(4): Xaa = Ala, Asp, Glu, Phe, Gly, His, Lys, Asn, Pro, Gln, Arg, Ser, Thr, Val, Trp or Tyr
  MOD_RES (5)...(5): Xaa = Ala, Asp, Glu, Phe, Gly, His, Lys, Leu, Met, Asn, Gln, Arg, Ser, Thr or Tyr
  MOD_RES (6)...(6): Xaa = Ala, Phe, His, Ile, Lys, Leu, Met, Gln, Arg, Ser, Thr, Val, Trp or Tyr
  MOD_RES (7)...(7): Xaa = Ala, Glu, Phe, His, Ile, Lys, Leu, Met, Asn, Pro, Gln, Arg, Ser, Thr or Val
  MOD_RES (9)...(9): Xaa = Ala, Asp, Glu, Gly, His, Lys, Leu, Asn, Pro, Gln, Arg, Ser, Thr, Val or Trp
  MOD_RES (10)...(10): Xaa = Asp, Glu, Gly, Ile, Lys, Leu, Asn, Pro, Gln, Arg, Ser, Thr or Val
  MOD_RES (11)...(11): Xaa = Ala, Asp, Glu, Gly, His, Ile, Lys, Asn, Pro, Gln, Arg, Ser, Thr or Tyr
  MOD_RES (12)...(12): Xaa = Ala, Asp, Glu, Phe, Gly, His, Ile, Lys, Leu, Asn, Pro, Gln, Arg, Ser, Thr, Val, Trp or Tyr
  MOD_RES (13)...(13): Xaa = Ala, Asp, Glu, Gly, His, Ile, Lys, Leu, Met, Asn, Gln, Arg, Thr or Val
  MOD_RES (15)...(15): Xaa = Ala, Phe, Ile, Lys, Leu, Thr, Val or Tyr
  MOD_RES (16)...(16): Xaa = Ala, Asp, Glu, Phe, Gly, His, Lys, Leu, Met, Asn, Pro, Gln, Arg, Ser, Thr, Val, Trp or Tyr
  MOD_RES (17)...(17): Xaa = Ala, Asp, Glu, Phe, Gly, His, Ile, Lys, Leu, Met, Asn, Pro, Gln, Arg, Ser, Thr, Val, or Tyr
  MOD_RES (18)...(18): Xaa = Ala, Asp, Glu, Phe, Gly, His, Ile, Lys, Leu, Met, Asn, Pro, Gln, Arg, Ser, Thr, Val, Trp or Tyr
  MOD_RES (19)...(19): Xaa = Ala, Asp, Glu, Phe, Gly, Lys, Leu, Met, Asn, Gln, Arg, Ser, Thr, Val, Trp or Tyr
  MOD_RES (20)...(20): Xaa = Ala, Glu, Phe, His, Ile, Lys, Leu, Met, Pro, Gln, Arg, Thr, Val, Trp or Tyr
  MOD_RES (23)...(23): Xaa = Ala, Asp, Glu, Phe, Gly, His, Lys, Leu, Met, Asn, Gln, Arg, Ser, Thr, Val, Trp or Tyr
  MOD_RES (24)...(24): Xaa = Ala, Asp, Glu, Phe, Gly, His, Ile, Lys, Leu, Met, Asn, Gln, Arg, Ser, Thr, Val, Trp or Tyr
  MOD_RES (25)...(25): Xaa = Ala, Asp, Glu, Phe, His, Ile, Lys, Leu, Asn, Pro, Gln, Arg, Ser, Thr, Val, Trp or Tyr
  MOD_RES (26)...(26): Xaa = Asp, Glu, His, Asn, Gln, Ser or Thr
  MOD_RES (28)...(28): Xaa = Ala, Asp, Phe, Gly, Leu, Met, Pro, Ser, Thr or Val
  MOD_RES (30)...(30): Xaa = Ala, Gly, His, Gln or Arg
  MOD_RES (31)...(31): Xaa = Ser, Thr or Tyr
  MOD_RES (34)...(34): Xaa = Ala, Glu, Gly, His, Leu, Met, Asn, Pro, Arg or Ser
  MOD_RES (35)...(35): Xaa = Ala, Asp, Glu, Gly, Asn, Pro, Gln, Val or Tyr
  MOD_RES (36)...(36): Xaa = Ala, Asp, Glu, His, Leu, Asn, Gln or Ser
CXXXXXXCXXXXXCXXXXXXCXXXXXCXXXXDEXXXC

SEQ ID NO: 229 - protein, 38 aa, Artificial Sequence
  LDL receptor class A domain monomer sequence
  MOD_RES (2)...(2): Xaa = Ala, Asp, Glu, Phe, Gly, His, Lys, Leu, Met, Asn, Pro, Gln, Arg, Ser, Thr or Val
  MOD_RES (3)...(3): Xaa = Ala, Cys, Asp, Glu, Gly, His, Ile, Lys, Leu, Met, Asn, Pro, Gln, Arg, Ser, Thr, Val, Trp or Tyr
  MOD_RES (4)...(4): Xaa = Ala, Asp, Glu, Phe, Gly, His, Lys, Asn, Pro, Gln, Arg, Ser, Thr, Val, Trp or Tyr
  MOD_RES (5)...(5): Xaa = Ala, Asp, Glu, Phe, Gly, His, Lys, Leu, Met, Asn, Gln, Arg, Ser, Thr or Tyr
  MOD_RES (6)...(6): Xaa = Ala, Phe, His, Ile, Lys, Leu, Met, Gln, Arg, Ser, Thr, Val, Trp or Tyr
  MOD_RES (7)...(7): Xaa = Ala, Glu, Phe, His, Ile, Lys, Leu, Met, Asn, Pro, Gln, Arg, Ser, Thr or Val
  MOD_RES (9)...(9): Xaa = Ala, Asp, Glu, Gly, His, Lys, Leu, Asn, Pro, Gln, Arg, Ser, Thr, Val or Trp
  MOD_RES (10)...(10): Xaa = Asp, Glu, Gly, Ile, Lys, Leu, Asn, Pro, Gln, Arg, Ser, Thr or Val
  MOD_RES (11)...(11): Xaa = Ala, Asp, Glu, Gly, His, Ile, Lys, Asn, Pro, Gln, Arg, Ser, Thr or Tyr
  MOD_RES (12)...(12): Xaa = Ala, Asp, Glu, Phe, Gly, His, Ile, Lys, Leu, Asn, Pro, Gln, Arg, Ser, Thr, Val, Trp or Tyr
  MOD_RES (13)...(13): Xaa = Ala, Asp, Glu, Gly, His, Ile, Lys, Leu, Met, Asn, Gln, Arg, Thr or Val
  MOD_RES (15)...(15): Xaa = Ala, Phe, Ile, Lys, Leu, Thr, Val or Tyr
  MOD_RES (16)...(16): Xaa = Ala, Asp, Glu, Phe, Gly, His, Lys, Leu, Met, Asn, Pro, Gln, Arg, Ser, Thr, Val, Trp or Tyr
  MOD_RES (17)...(17): Xaa = Ala, Asp, Glu, Phe, Gly, His, Ile, Lys, Leu, Met, Asn, Pro, Gln, Arg, Ser, Thr, Val, or Tyr
  MOD_RES (18)...(18): Xaa = Ala, Asp, Glu, Phe, Gly, His, Ile, Lys, Leu, Met, Asn, Pro, Gln, Arg, Ser, Thr, Val, Trp or Tyr
  MOD_RES (19)...(19): Xaa = Ala, Asp, Glu, Phe, Gly, Lys, Leu, Met, Asn, Gln, Arg, Ser, Thr, Val, Trp or Tyr
  MOD_RES (20)...(20): Xaa = Ala, Glu, Phe, His, Ile, Lys, Leu, Met, Pro, Gln, Arg, Thr, Val, Trp or Tyr
  MOD_RES (23)...(23): Xaa = Ala, Asp, Glu, Phe, Gly, His, Lys, Leu, Met, Asn, Gln, Arg, Ser, Thr, Val, Trp or Tyr
  MOD_RES (24)...(24): Xaa = Ala, Asp, Glu, Phe, Gly, His, Ile, Lys, Leu, Met, Asn, Gln, Arg, Ser, Thr, Val, Trp or Tyr
  MOD_RES (25)...(25): Xaa = Ala, Asp, Glu, Phe, His, Ile, Lys, Leu, Asn, Pro, Gln, Arg, Ser, Thr, Val, Trp or Tyr
  MOD_RES (26)...(26): Xaa = Asp, Glu, His, Asn, Gln, Ser or Thr
  MOD_RES (28)...(28): Xaa = Glu, Gly, Lys, Leu, Pro, Gln, Arg or Ser
  MOD_RES (29)...(29): Xaa = Asp, Asn or Ser
  MOD_RES (30)...(30): Xaa = Asp, Phe, Gly, His, Lys, Asn, Gln, Arg, Ser, Trp or Tyr
  MOD_RES (31)...(31): Xaa = Ala, Glu, Leu, Ser or Thr
  MOD_RES (34)...(34): Xaa = Ala, Asp, Glu, Gly, Lys, Leu, Met, Asn, Pro, Ser, Thr or Trp
  MOD_RES (35)...(35): Xaa = Ala, Asp, Glu, His, Ile, Lys, Leu, Met, Asn, Pro, Gln, Arg or Ser
  MOD_RES (36)...(36): Xaa = Ala, Asp, Glu, Gly, His, Ile, Lys, Leu, Gln, Ser, Thr, Val or Tyr
  MOD_RES (37)...(37): Xaa = Ala, Glu, His, Ile, Leu, Met, Asn, Pro, Gln, Arg, Thr, Val or Tyr
CXXXXXXCXXXXXCXXXXXXCXXXXXCXXXXDEXXXXC

SEQ ID NO: 230 - protein, 37 aa, Artificial Sequence
  LDL receptor class A domain monomer sequence
  MOD_RES (2)...(2): Xaa = Ala, Asp, Glu, Phe, Gly, His, Lys, Leu, Asn, Pro, Arg, Ser or Thr
  MOD_RES (3)...(3): Xaa = Ala, Asp, Glu, Gly, His, Leu, Asn, Pro, Arg, Ser or Thr
  MOD_RES (4)...(4): Xaa = Asp, Phe, Gly, Lys, Leu, Asn, Pro, Gln, Arg, Ser, Thr, Val or Tyr
  MOD_RES (5)...(5): Xaa = Asp, Glu, Phe, Gly, His, Lys, Met, Asn, Arg, Ser, Thr or Val
  MOD_RES (6)...(6): Xaa = Asp, Glu, Gly, Lys, Leu, Asn, Pro, Gln or Arg
  MOD_RES (7)...(7): Xaa = Phe, His, Leu, Val or Trp
  MOD_RES (8)...(8): Xaa = Ala, Glu, Gly, Lys, Leu, Met, Arg, Ser, Thr or Val
  MOD_RES (10)...(10): Xaa = Ala, Asp, Glu, Gly, His, Lys, Leu, Asn, Pro, Gln, Arg, Ser, Thr, Val or Trp
  MOD_RES (11)...(11): Xaa = Asp, Glu, Gly, Ile, Lys, Leu, Asn, Pro, Gln, Arg, Ser, Thr or Val
  MOD_RES (12)...(12): Xaa = Ala, Asp, Glu, Gly, His, Ile, Lys, Asn, Pro, Gln, Arg, Ser, Thr or Tyr
  MOD_RES (13)...(13): Xaa = Ala, Asp, Glu, Phe, Gly, His, Ile, Lys, Leu, Asn, Pro, Gln, Arg, Ser, Thr, Val, Trp or Tyr
  MOD_RES (14)...(14): Xaa = Ala, Asp, Glu, Gly, His, Ile, Lys, Leu, Met, Asn, Gln, Arg, Thr or Val
  MOD_RES (16)...(16): Xaa = Ala, Phe, Ile, Lys, Leu, Thr, Val or Tyr
  MOD_RES (17)...(17): Xaa = Ala, Asp, Glu, Phe, Gly, His, Lys, Leu, Met, Asn, Pro, Gln, Arg, Ser, Thr, Val, Trp or Tyr
  MOD_RES (18)...(18): Xaa = Ala, Asp, Glu, Phe, Gly, His, Ile, Lys, Leu, Met, Asn, Pro, Gln, Arg, Ser, Thr, Val, or Tyr
  MOD_RES (19)...(19): Xaa = Ala, Asp, Glu, Phe, Gly, His, Ile, Lys, Leu, Met, Asn, Pro, Gln, Arg, Ser, Thr, Val, Trp or Tyr
  MOD_RES (20)...(20): Xaa = Ala, Asp, Glu, Phe, Gly, Lys, Leu, Met, Asn, Gln, Arg, Ser, Thr, Val, Trp or Tyr
  MOD_RES (21)...(21): Xaa = Ala, Glu, Phe, His, Ile, Lys, Leu, Met, Pro, Gln, Arg, Thr, Val, Trp or Tyr
  MOD_RES (24)...(24): Xaa = Ala, Asp, Glu, Phe, Gly, His, Lys, Leu, Met, Asn, Gln, Arg, Ser, Thr, Val, Trp or Tyr
  MOD_RES (25)...(25): Xaa = Ala, Asp, Glu, Phe, Gly, His, Ile, Lys, Leu, Met, Asn, Gln, Arg, Ser, Thr, Val, Trp or Tyr
  MOD_RES (26)...(26): Xaa = Ala, Asp, Glu, Phe, His, Ile, Lys, Leu, Asn, Pro, Gln, Arg, Ser, Thr, Val, Trp or Tyr
  MOD_RES (27)...(27): Xaa = Asp, Glu, His, Asn, Gln, Ser or Thr
  MOD_RES (29)...(29): Xaa = Ala, Asp, Glu, Gly, His, Ile, Lys, Leu, Met, Pro, Gln, Arg, Ser, Thr or Val
  MOD_RES (30)...(30): Xaa = Asp, Gly, His, Asn, Gln, Ser, Thr or Tyr
  MOD_RES (31)...(31): Xaa = Ala, Asp, Glu, Phe, Gly, His, Lys, Leu, Met, Asn, Gln, Arg, Ser, Trp or Tyr
  MOD_RES (32)...(32): Xaa = Ala, Glu, Gly, Leu, Met, Arg, Ser or Thr
  MOD_RES (35)...(35): Xaa = Ala, Asp, Glu, Phe, Gly, His, Ile, Lys, Leu, Met, Asn, Gln, Arg, Ser, Thr, Val, Trp or Tyr
  MOD_RES (36)...(36): Xaa = Ala, Asp, Glu, Phe, Gly, His, Ile, Lys, Leu, Met, Asn, Pro, Gln, Arg or Ser
CXXXXXXXCXXXXXCXXXXXXCXXXXXCXXXXDEXXC

SEQ ID NO: 231 - protein, 38 aa, Artificial Sequence
  LDL receptor class A domain monomer sequence
  MOD_RES (2)...(2): Xaa = Ala, Asp, Glu, Phe, Gly, His, Lys, Leu, Asn, Pro, Arg, Ser or Thr
  MOD_RES (3)...(3): Xaa = Ala, Asp, Glu, Gly, His, Leu, Asn, Pro, Arg, Ser or Thr
  MOD_RES (4)...(4): Xaa = Asp, Phe, Gly, Lys, Leu, Asn, Pro, Gln, Arg, Ser, Thr, Val or Tyr
  MOD_RES (5)...(5): Xaa = Asp, Glu, Phe, Gly, His, Lys, Met, Asn, Arg, Ser, Thr or Val
  MOD_RES (6)...(6): Xaa = Asp, Glu, Gly, Lys, Leu, Asn, Pro, Gln or Arg
  MOD_RES (7)...(7): Xaa = Phe, His, Leu, Val or Trp
  MOD_RES (8)...(8): Xaa = Ala, Glu, Gly, Lys, Leu, Met, Arg, Ser, Thr or Val
  MOD_RES (10)...(10): Xaa = Ala, Asp, Glu, Gly, His, Lys, Leu, Asn, Pro, Gln, Arg, Ser, Thr, Val or Trp
  MOD_RES (11)...(11): Xaa = Asp, Glu, Gly, Ile, Lys, Leu, Asn, Pro, Gln, Arg, Ser, Thr or Val
  MOD_RES (12)...(12): Xaa = Ala, Asp, Glu, Gly, His, Ile, Lys, Asn, Pro, Gln, Arg, Ser, Thr or Tyr
  MOD_RES (13)...(13): Xaa = Ala, Asp, Glu, Phe, Gly, His, Ile, Lys, Leu, Asn, Pro, Gln, Arg, Ser, Thr, Val, Trp or Tyr
  MOD_RES (14)...(14): Xaa = Ala, Asp, Glu, Gly, His, Ile, Lys, Leu, Met, Asn, Gln, Arg, Thr or Val
  MOD_RES (16)...(16): Xaa = Ala, Phe, Ile, Lys, Leu, Thr, Val or Tyr
  MOD_RES (17)...(17): Xaa = Ala, Asp, Glu, Phe, Gly, His, Lys, Leu, Met, Asn, Pro, Gln, Arg, Ser, Thr, Val, Trp or Tyr
  MOD_RES (18)...(18): Xaa = Ala, Asp, Glu, Phe, Gly, His, Ile, Lys, Leu, Met, Asn, Pro, Gln, Arg, Ser, Thr, Val, or Tyr
  MOD_RES (19)...(19): Xaa = Ala, Asp, Glu, Phe, Gly, His, Ile, Lys, Leu, Met, Asn, Pro, Gln, Arg, Ser, Thr, Val, Trp or Tyr
  MOD_RES (20)...(20): Xaa = Ala, Asp, Glu, Phe, Gly, Lys, Leu, Met, Asn, Gln, Arg, Ser, Thr, Val, Trp or Tyr
  MOD_RES (21)...(21): Xaa = Ala, Glu, Phe, His, Ile, Lys, Leu, Met, Pro, Gln, Arg, Thr, Val, Trp or Tyr
  MOD_RES (24)...(24): Xaa = Ala, Asp, Glu, Phe, Gly, His, Lys, Leu, Met, Asn, Gln, Arg, Ser, Thr, Val, Trp or Tyr
  MOD_RES (25)...(25): Xaa = Ala, Asp, Glu, Phe, Gly, His, Ile, Lys, Leu, Met, Asn, Gln, Arg, Ser, Thr, Val, Trp or Tyr
  MOD_RES (26)...(26): Xaa = Ala, Asp, Glu, Phe, His, Ile, Lys, Leu, Asn, Pro, Gln, Arg, Ser, Thr, Val, Trp or Tyr
  MOD_RES (27)...(27): Xaa = Asp, Glu, His, Asn, Gln, Ser or Thr
  MOD_RES (29)...(29): Xaa = Ala, Asp, Phe, Gly, Leu, Met, Pro, Ser, Thr or Val
  MOD_RES (31)...(31): Xaa = Ala, Gly, His, Gln or Arg
  MOD_RES (32)...(32): Xaa = Ser, Thr or Tyr
  MOD_RES (35)...(35): Xaa = Ala, Glu, Gly, His, Leu, Met, Asn, Pro, Arg or Ser
  MOD_RES (36)...(36): Xaa = Ala, Asp, Glu, Gly, Asn, Pro, Gln, Val or Tyr
  MOD_RES (37)...(37): Xaa = Ala, Asp, Glu, His, Leu, Asn, Gln or Ser
CXXXXXXXCXXXXXCXXXXXXCXXXXXCXXXXDEXXXC

SEQ ID NO: 232 - protein, 39 aa, Artificial Sequence
  LDL receptor class A domain monomer sequence
  MOD_RES (2)...(2): Xaa = Ala, Asp, Glu, Phe, Gly, His, Lys, Leu, Asn, Pro, Arg, Ser or Thr
  MOD_RES (3)...(3): Xaa = Ala, Asp, Glu, Gly, His, Leu, Asn, Pro, Arg, Ser or Thr
  MOD_RES (4)...(4): Xaa = Asp, Phe, Gly, Lys, Leu, Asn, Pro, Gln, Arg, Ser, Thr, Val or Tyr
  MOD_RES (5)...(5): Xaa = Asp, Glu, Phe, Gly, His, Lys, Met, Asn, Arg, Ser, Thr or Val
  MOD_RES (6)...(6): Xaa = Asp, Glu, Gly, Lys, Leu, Asn, Pro, Gln or Arg
  MOD_RES (7)...(7): Xaa = Phe, His, Leu, Val or Trp
  MOD_RES (8)...(8): Xaa = Ala, Glu, Gly, Lys, Leu, Met, Arg, Ser, Thr or Val
  MOD_RES (10)...(10): Xaa = Ala, Asp, Glu, Gly, His, Lys, Leu, Asn, Pro, Gln, Arg, Ser, Thr, Val or Trp
  MOD_RES (11)...(11): Xaa = Asp, Glu, Gly, Ile, Lys, Leu, Asn, Pro, Gln, Arg, Ser, Thr or Val
  MOD_RES (12)...(12): Xaa = Ala, Asp, Glu, Gly, His, Ile, Lys, Asn, Pro, Gln, Arg, Ser, Thr or Tyr
  MOD_RES (13)...(13): Xaa = Ala, Asp, Glu, Phe, Gly, His, Ile, Lys, Leu, Asn, Pro, Gln, Arg, Ser, Thr, Val, Trp or Tyr
  MOD_RES (14)...(14): Xaa = Ala, Asp, Glu, Gly, His, Ile, Lys, Leu, Met, Asn, Gln, Arg, Thr or Val
  MOD_RES (16)...(16): Xaa = Ala, Phe, Ile, Lys, Leu, Thr, Val or Tyr
  MOD_RES (17)...(17): Xaa = Ala, Asp, Glu, Phe, Gly, His, Lys, Leu, Met, Asn, Pro, Gln, Arg, Ser, Thr, Val, Trp or Tyr
  MOD_RES (18)...(18): Xaa = Ala, Asp, Glu, Phe, Gly, His, Ile, Lys, Leu, Met, Asn, Pro, Gln, Arg, Ser, Thr, Val, or Tyr
  MOD_RES (19)...(19): Xaa = Ala, Asp, Glu, Phe, Gly, His, Ile, Lys, Leu, Met, Asn, Pro, Gln, Arg, Ser, Thr, Val, Trp or Tyr
  MOD_RES (20)...(20): Xaa = Ala, Asp, Glu, Phe, Gly, Lys, Leu, Met, Asn, Gln, Arg, Ser, Thr, Val, Trp or Tyr
  MOD_RES (21)...(21): Xaa = Ala, Glu, Phe, His, Ile, Lys, Leu, Met, Pro, Gln, Arg, Thr, Val, Trp or Tyr
  MOD_RES (24)...(24): Xaa = Ala, Asp, Glu, Phe, Gly, His, Lys, Leu, Met, Asn, Gln, Arg, Ser, Thr, Val, Trp or Tyr
  MOD_RES (25)...(25): Xaa = Ala, Asp, Glu, Phe, Gly, His, Ile, Lys, Leu, Met, Asn, Gln, Arg, Ser, Thr, Val, Trp or Tyr
  MOD_RES (26)...(26): Xaa = Ala, Asp, Glu, Phe, His, Ile, Lys, Leu, Asn, Pro, Gln, Arg, Ser, Thr, Val, Trp or Tyr
  MOD_RES (27)...(27): Xaa = Asp, Glu, His, Asn, Gln, Ser or Thr
  MOD_RES (29)...(29): Xaa = Glu, Gly, Lys, Leu, Pro, Gln, Arg or Ser
  MOD_RES (30)...(30): Xaa = Asp, Asn or Ser
  MOD_RES (31)...(31): Xaa = Asp, Phe, Gly, His, Lys, Asn, Gln, Arg, Ser, Trp or Tyr
  MOD_RES (32)...(32): Xaa = Ala, Glu, Leu, Ser or Thr
  MOD_RES (35)...(35): Xaa = Ala, Asp, Glu, Gly, Lys, Leu, Met, Asn, Pro, Ser, Thr or Trp
  MOD_RES (36)...(36): Xaa = Ala, Asp, Glu, His, Ile, Lys, Leu, Met, Asn, Pro, Gln, Arg or Ser
  MOD_RES (37)...(37): Xaa = Ala, Asp, Glu, Gly, His, Ile, Lys, Leu, Gln, Ser, Thr, Val or Tyr
  MOD_RES (38)...(38): Xaa = Ala, Glu, His, Ile, Leu, Met, Asn, Pro, Gln, Arg, Thr, Val or Tyr
CXXXXXXXCXXXXXCXXXXXXCXXXXXCXXXXDEXXXXC

SEQ ID NO: 233 - protein, 68 aa, Artificial Sequence
  EGF domain monomer sequence
  MOD_RES (2)...(15): Xaa = any amino acid, Xaa at positions 5-15 may be present or absent
  MOD_RES (17)...(23): Xaa = any amino acid, Xaa at positions 20-23 may be present or absent
  MOD_RES (25)...(40): Xaa = any amino acid, Xaa at positions 29-40 may be present or absent
  MOD_RES (42)...(43): Xaa = any amino acid, Xaa at position 43 may be present or absent
  MOD_RES (45)...(67): Xaa = any amino acid, Xaa at positions 53-67 may be present or absent
  DISULFID (1)...(24)
  DISULFID (16)...(44)
  DISULFID (41)...(68)
CXXXXXXXXXXXXXXCXXXXXXXCXXXXXXXXXXXXXXXXCXXCXXXXXXXXXXXXXXXXXXXXXXXC

SEQ ID NO: 234 - protein, 30 aa, Artificial Sequence
  EGF domain monomer sequence
  MOD_RES (2)...(2): Xaa = Ala, Asp, Glu, Phe, Gly, His, Ile, Lys, Leu, Asn, Pro, Gln, Arg, Ser, Thr, Val or Trp
  MOD_RES (3)...(3): Xaa = Ala, Asp, Glu, Gly, His, Lys, Leu, Met, Asn, Pro, Arg, Ser, Thr or Tyr
  MOD_RES (4)...(4): Xaa = Ala, Asp, Glu, Gly, His, Lys, Leu, Met, Asn, Pro, Gln, Arg, Ser, Thr, Val or Trp
  MOD_RES (5)...(5): Xaa = Ala, Glu, Gly, Met, Asn, Pro, Gln, Arg, Ser, Thr or Tyr
  MOD_RES (7)...(7): Xaa = Ala, Asp, Glu, Gly, His, Lys, Asn, Pro, Gln, Ser, Thr or Val
  MOD_RES (8)...(8): Xaa = Phe, Gly, His, Leu, Asn, Gln, Ser, Thr or Tyr
  MOD_RES (9)...(9): Xaa = Ala, Asp, Glu, Phe, Gly, His, Ile, Lys, Leu, Asn, Gln, Arg, Ser, Thr, Val or Tyr
  MOD_RES (11)...(11): Xaa = Ala, Asp, Glu, Phe, Gly, His, Ile, Lys, Leu, Met, Asn, Gln, Arg, Ser, Thr, Val, Trp or Tyr
  MOD_RES (12)...(12): Xaa = Ala, Asp, Glu, Lys, Leu, Asn, Pro, Gln, Arg, Ser, Thr or Val
  MOD_RES (13)...(13): Xaa = Ala, Cys, Asp, Glu, Phe, Gly, His, Ile, Lys, Leu, Met, Asn, Pro, Gln, Arg, Ser, Thr, Val or Tyr
  MOD_RES (14)...(14): Xaa = Ala, Asp, Glu, Phe, Gly, His, Ile, Lys, Leu, Met, Asn, Pro, Gln, Arg, Ser, Thr, Val, Trp or Tyr
  MOD_RES (15)...(15): Xaa = Ala, Asp, Glu, Phe, Gly, His, Ile, Lys, Leu, Asn, Pro, Gln, Arg, Ser, Thr, Val or Trp
  MOD_RES (16)...(16): Xaa = Ala, Asp, Glu, Gly, His, Lys, Leu, Met, Asn, Gln, Arg, Ser, Thr, Val, Trp or Tyr
  MOD_RES (17)...(17): Xaa = Ala, Phe, His, Ile, Leu, Pro, Arg, Thr, Val or Tyr
  MOD_RES (18)...(18): Xaa = Ala, Asp, Glu, Phe, His, Ile, Lys, Leu, Met, Asn, Gln, Arg, Ser, Thr, Val, Trp or Tyr
  MOD_RES (20)...(20): Xaa = Ala, Asp, Glu, Phe, Gly, His, Ile, Lys, Leu, Met, Asn, Pro, Gln, Arg, Ser, Thr, Val, Trp or Tyr
  MOD_RES (22)...(22): Xaa = Ala, Asp, Glu, Phe, His, Lys, Leu, Met, Asn, Pro, Gln, Arg, Ser, Thr, Val, Trp or Tyr
  MOD_RES (23)...(23): Xaa = Ala, Asp, Glu, Phe, Gly, His, Lys, Leu, Asn, Pro, Gln, Arg, Ser, Thr, Val or Tyr
  MOD_RES (24)...(24): Xaa = Ala, Glu, Gly, His, Lys, Leu, Asn, Pro, Arg, Ser, Thr or Tyr
  MOD_RES (25)...(25): Xaa = Phe, His, Ile, Leu, Met, Arg, Thr, Trp or Tyr
  MOD_RES (26)...(26): Xaa = Ala, Asp, Glu, Phe, Gly, His, Ile, Lys, Leu, Met, Asn, Gln, Arg, Ser, Thr, Val or Tyr
  MOD_RES (27)...(27): Xaa = Asp, Gly or Ser
  MOD_RES (28)...(28): Xaa = Ala, Asp, Glu, Phe, His, Ile, Lys, Leu, Asn, Pro, Gln, Arg, Ser, Thr, Val or Tyr
  MOD_RES (29)...(29): Xaa = Ala, Asp, Glu, Phe, His, Ile, Lys, Leu, Met, Asn, Gln, Arg, Ser, Thr or Tyr
CXXXXCXXXCXXXXXXXXCXCXXXXXXXXC

SEQ ID NO: 235 - protein, 31 aa, Artificial Sequence
  EGF domain monomer sequence
  MOD_RES (2)...(2): Xaa = Ala, Asp, Glu, Phe, Gly, His, Ile, Lys, Leu, Asn, Pro, Gln, Arg, Ser, Thr, Val or Trp
  MOD_RES (3)...(3): Xaa = Ala, Asp, Glu, Gly, His, Lys, Leu, Met, Asn, Pro, Arg, Ser, Thr or Tyr
  MOD_RES (4)...(4): Xaa = Ala, Asp, Glu, Gly, His, Lys, Leu, Met, Asn, Pro, Gln, Arg, Ser, Thr, Val or Trp
  MOD_RES (5)...(5): Xaa = Ala, Glu, Gly, Met, Asn, Pro, Gln, Arg, Ser, Thr or Tyr
  MOD_RES (7)...(7): Xaa = Ala, Asp, Glu, Gly, His, Lys, Asn, Pro, Gln, Ser, Thr or Val
  MOD_RES (8)...(8): Xaa = Phe, Gly, His, Leu, Asn, Gln, Ser, Thr or Tyr
  MOD_RES (9)...(9): Xaa = Ala, Asp, Glu, Phe, Gly, His, Ile, Lys, Leu, Asn, Gln, Arg, Ser, Thr, Val or Tyr
  MOD_RES (11)...(11): Xaa = Ala, Asp, Glu, Phe, Gly, His, Ile, Lys, Leu, Met, Asn, Gln, Arg, Ser, Thr, Val, Trp or Tyr
  MOD_RES (12)...(12): Xaa = Ala, Asp, Glu, Lys, Leu, Asn, Pro, Gln, Arg, Ser, Thr or Val
  MOD_RES (13)...(13): Xaa = Ala, Cys, Asp, Glu, Phe, Gly, His, Ile, Lys, Leu, Met, Asn, Pro, Gln, Arg, Ser, Thr, Val or Tyr
  MOD_RES (14)...(14): Xaa = Ala, Asp, Glu, Phe, Gly, His, Ile, Lys, Leu, Met, Asn, Pro, Gln, Arg, Ser, Thr, Val, Trp or Tyr
  MOD_RES (15)...(15): Xaa = Ala, Asp, Glu, Phe, Gly, His, Ile, Lys, Leu, Asn, Pro, Gln, Arg, Ser, Thr, Val or Trp
  MOD_RES (16)...(16): Xaa = Ala, Asp, Glu, Gly, His, Lys, Leu, Met, Asn, Gln, Arg, Ser, Thr, Val, Trp or Tyr
  MOD_RES (17)...(17): Xaa = Ala, Phe, His, Ile, Leu, Pro, Arg, Thr, Val or Tyr
  MOD_RES (18)...(18): Xaa = Ala, Asp, Glu, Phe, His, Ile, Lys, Leu, Met, Asn, Gln, Arg, Ser, Thr, Val, Trp or Tyr
  MOD_RES (20)...(20): Xaa = Ala, Asp, Glu, Phe, Gly, His, Ile, Lys, Leu, Met, Asn, Pro, Gln, Arg, Ser, Thr, Val, Trp or Tyr
  MOD_RES (22)...(22): Xaa = Ala, Asp, Glu, Phe, Gly, His, Ile, Lys, Leu, Asn, Pro, Gln, Arg, Ser, Thr, Val or Tyr
  MOD_RES (23)...(23): Xaa = Ala, Asp, Glu, Phe, His, Ile, Lys, Leu, Met, Asn, Pro, Gln, Arg, Ser, Thr or Val
  MOD_RES (24)...(24): Xaa = Asp, Glu, Gly, Asn, Pro or Ser
  MOD_RES (25)...(25): Xaa = Ala, Asp, Glu, Phe, His, Leu, Met, Gln, Arg, Ser, Thr, Trp or Tyr
  MOD_RES (26)...(26): Xaa = Ala, Asp, Glu, Phe, Gly, His, Ile, Lys, Leu, Met, Asn, Gln, Arg, Ser, Thr, Val or Tyr
  MOD_RES (27)...(27): Xaa = Ala, Phe, Gly, Ile, Lys, Leu, Met, Pro, Gln, Arg, Ser, Thr, Val, Trp or Tyr
  MOD_RES (28)...(28): Xaa = Ala, Asp, Glu, Phe, Gly, His, Lys, Leu, Met, Asn, Pro, Gln, Arg, Ser, Thr, Val or Trp
  MOD_RES (29)...(29): Xaa = Ala, Asp, Glu, Gly, Ile, Lys, Leu, Met, Asn, Pro, Gln, Arg, Ser, Thr, Val or Tyr
  MOD_RES (30)...(30): Xaa = Ala, Asp, Glu, Phe, Gly, His, Ile, Lys, Leu, Met, Asn, Gln, Ser, Thr or Val
CXXXXCXXXCXXXXXXXXCXCXXXXXXXXXC

SEQ ID NO: 236 - protein, 32 aa, Artificial Sequence
  EGF domain monomer sequence
  MOD_RES (2)...(2): Xaa = Ala, Asp, Glu, Phe, Gly, His, Ile, Lys, Leu, Asn, Pro, Gln, Arg, Ser, Thr, Val or Trp
  MOD_RES (3)...(3): Xaa = Ala, Asp, Glu, Gly, His, Lys, Leu, Met, Asn, Pro, Arg, Ser, Thr or Tyr
  MOD_RES (4)...(4): Xaa = Ala, Asp, Glu, Gly, His, Lys, Leu, Met, Asn, Pro, Gln, Arg, Ser, Thr, Val or Trp
  MOD_RES (5)...(5): Xaa = Ala, Glu, Gly, Met, Asn, Pro, Gln, Arg, Ser, Thr or Tyr
  MOD_RES (7)...(7): Xaa = Ala, Asp, Glu, Gly, His, Lys, Asn, Pro, Gln, Ser, Thr or Val
  MOD_RES (8)...(8): Xaa = Phe, Gly, His, Leu, Asn, Gln, Ser, Thr or Tyr
  MOD_RES (9)...(9): Xaa = Ala, Asp, Glu, Phe, Gly, His, Ile, Lys, Leu, Asn, Gln, Arg, Ser, Thr, Val or Tyr
  MOD_RES (11)...(11): Xaa = Ala, Asp, Glu, Phe, Gly, His, Ile, Lys, Leu, Met, Asn, Gln, Arg, Ser, Thr, Val, Trp or Tyr
  MOD_RES (12)...(12): Xaa = Ala, Asp, Glu, Lys, Leu, Asn, Pro, Gln, Arg, Ser, Thr or Val
  MOD_RES (13)...(13): Xaa = Ala, Cys, Asp, Glu, Phe, Gly, His, Ile, Lys, Leu, Met, Asn, Pro, Gln, Arg, Ser, Thr, Val or Tyr
  MOD_RES (14)...(14): Xaa = Ala, Asp, Glu, Phe, Gly, His, Ile, Lys, Leu, Met, Asn, Pro, Gln, Arg, Ser, Thr, Val, Trp or Tyr
  MOD_RES (15)...(15): Xaa = Ala, Asp, Glu, Phe, Gly, His, Ile, Lys, Leu, Asn, Pro, Gln, Arg, Ser, Thr, Val or Trp
  MOD_RES (16)...(16): Xaa = Ala, Asp, Glu, Gly, His, Lys, Leu, Met, Asn, Gln, Arg, Ser, Thr, Val, Trp or Tyr
  MOD_RES (17)...(17): Xaa = Ala, Phe, His, Ile, Leu, Pro, Arg, Thr, Val or Tyr
  MOD_RES (18)...(18): Xaa = Ala, Asp, Glu, Phe, His, Ile, Lys, Leu, Met, Asn, Gln, Arg, Ser, Thr, Val, Trp or Tyr
  MOD_RES (20)...(20): Xaa = Ala, Asp, Glu, Phe, Gly, His, Ile, Lys, Leu, Met, Asn, Pro, Gln, Arg, Ser, Thr, Val, Trp or Tyr
  MOD_RES (22)...(22): Xaa = Ala, Asp, Glu, Phe, Gly, His, Ile, Lys, Leu, Asn, Pro, Gln, Arg, Ser, Thr, Val or Tyr
  MOD_RES (23)...(23): Xaa = Ala, Asp, Glu, Phe, His, Ile, Lys, Leu, Met, Asn, Pro, Gln, Arg, Ser, Thr or Val
  MOD_RES (24)...(24): Xaa = Asp, Glu, Gly, Asn, Pro or Ser
  MOD_RES (25)...(25): Xaa = Ala, Asp, Glu, Phe, His, Leu, Met, Gln, Arg, Ser, Thr, Trp or Tyr
  MOD_RES (26)...(26): Xaa = Ala, Asp, Glu, Phe, Gly, His, Ile, Lys, Leu, Met, Asn, Gln, Arg, Ser, Thr, Val or Tyr
  MOD_RES (27)...(27): Xaa = Ala, Phe, Gly, Ile, Lys, Leu, Met, Pro, Gln, Arg, Ser, Thr, Val, Trp or Tyr
  MOD_RES (28)...(28): Xaa = Ala, Asp, Glu, Phe, Gly, His, Lys, Leu, Met, Asn, Pro, Gln, Arg, Ser, Thr, Val or Trp
  MOD_RES (29)...(29): Xaa = Ala, Asp, Glu, Gly, Ile, Lys, Leu, Met, Asn, Pro, Gln, Arg, Ser, Thr, Val or Tyr
  MOD_RES (30)...(30): Xaa = Ala, Asp, Glu, Phe, Gly, His, Ile, Lys, Leu, Met, Asn, Gln, Ser, Thr or Val
  MOD_RES (31)...(31): Xaa = Glu, Phe, Gly, His, Ile, Lys, Leu, Met, Asn, Pro, Gln, Arg, Ser, Thr or Trp
CXXXXCXXXCXXXXXXXXCXCXXXXXXXXXXC

SEQ ID NO: 237 - protein, 33 aa, Artificial Sequence
  EGF domain monomer sequence
  MOD_RES (2)...(2): Xaa = Ala, Asp, Glu, Phe, Gly, His, Ile, Lys, Leu, Asn, Pro, Gln, Arg, Ser, Thr, Val or Trp
  MOD_RES (3)...(3): Xaa = Ala, Asp, Glu, Gly, His, Lys, Leu, Met, Asn, Pro, Arg, Ser, Thr or Tyr
  MOD_RES (4)...(4): Xaa = Ala, Asp, Glu, Gly, His, Lys, Leu, Met, Asn, Pro, Gln, Arg, Ser, Thr, Val or Trp
  MOD_RES (5)...(5): Xaa = Ala, Glu, Gly, Met, Asn, Pro, Gln, Arg, Ser, Thr or Tyr
  MOD_RES (7)...(7): Xaa = Ala, Asp, Glu, Gly, His, Lys, Asn, Pro, Gln, Ser, Thr or Val
  MOD_RES (8)...(8): Xaa = Phe, Gly, His, Leu, Asn, Gln, Ser, Thr or Tyr
  MOD_RES (9)...(9): Xaa = Ala, Asp, Glu, Phe, Gly, His, Ile, Lys, Leu, Asn, Gln, Arg, Ser, Thr, Val or Tyr
  MOD_RES (11)...(11): Xaa = Ala, Asp, Glu, Phe, Gly, His, Ile, Lys, Leu, Met, Asn, Gln, Arg, Ser, Thr, Val, Trp or Tyr
  MOD_RES (12)...(12): Xaa = Ala, Asp, Glu, Lys, Leu, Asn, Pro, Gln, Arg, Ser, Thr or Val
  MOD_RES (13)...(13): Xaa = Ala, Cys, Asp, Glu, Phe, Gly, His, Ile, Lys, Leu, Met, Asn, Pro, Gln, Arg, Ser, Thr, Val or Tyr
  MOD_RES (14)...(14): Xaa = Ala, Asp, Glu, Phe, Gly, His, Ile, Lys, Leu, Met, Asn, Pro, Gln, Arg, Ser, Thr, Val, Trp or Tyr
  MOD_RES (15)...(15): Xaa = Ala, Asp, Glu, Phe, Gly, His, Ile, Lys, Leu, Asn, Pro, Gln, Arg, Ser, Thr, Val or Trp
  MOD_RES (16)...(16): Xaa = Ala, Asp, Glu, Gly, His, Lys, Leu, Met, Asn, Gln, Arg, Ser, Thr, Val, Trp or Tyr
  MOD_RES (17)...(17): Xaa = Ala, Phe, His, Ile, Leu, Pro, Arg, Thr, Val or Tyr
  MOD_RES (18)...(18): Xaa = Ala, Asp, Glu, Phe, His, Ile, Lys, Leu, Met, Asn, Gln, Arg, Ser, Thr, Val, Trp or Tyr
  MOD_RES (20)...(20): Xaa = Ala, Asp, Glu, Phe, Gly, His, Ile, Lys, Leu, Met, Asn, Pro, Gln, Arg, Ser, Thr, Val, Trp or Tyr
  MOD_RES (22)...(22): Xaa = Ala, Asp, Glu, Phe, Gly, His, Ile, Lys, Leu, Asn, Pro, Gln, Arg, Ser, Thr, Val or Tyr
  MOD_RES (23)...(23): Xaa = Ala, Asp, Glu, Phe, His, Ile, Lys, Leu, Met, Asn, Pro, Gln, Arg, Ser, Thr or Val
  MOD_RES (24)...(24): Xaa = Asp, Glu, Gly, Asn, Pro or Ser
  MOD_RES (25)...(25): Xaa = Ala, Asp, Glu, Phe, His, Leu, Met, Gln, Arg, Ser, Thr, Trp or Tyr
  MOD_RES (26)...(26): Xaa = Ala, Asp, Glu, Phe, Gly, His, Ile, Lys, Leu, Met, Asn, Gln, Arg, Ser, Thr, Val or Tyr
  MOD_RES (27)...(27): Xaa = Ala, Phe, Gly, Ile, Lys, Leu, Met, Pro, Gln, Arg, Ser, Thr, Val, Trp or Tyr
  MOD_RES (28)...(28): Xaa = Ala, Asp, Glu, Phe, Gly, His, Lys, Leu, Met, Asn, Pro, Gln, Arg, Ser, Thr, Val or Trp
  MOD_RES (29)...(29): Xaa = Ala, Asp, Glu, Gly, Ile, Lys, Leu, Met, Asn, Pro, Gln, Arg, Ser, Thr, Val or Tyr
  MOD_RES (30)...(30): Xaa = Ala, Asp, Glu, Phe, Gly, His, Ile, Lys, Leu, Met, Asn, Gln, Ser, Thr or Val
  MOD_RES (31)...(31): Xaa = Glu, Phe, Gly, His, Ile, Lys, Leu, Met, Asn, Pro, Gln, Arg, Ser, Thr or Trp
  MOD_RES (32)...(32): Xaa = Ala, Asp, Glu, Phe, Gly, His, Lys, Leu, Met, Asn, Pro, Gln, Arg, Ser, Thr, Val or Tyr
CXXXXCXXXCXXXXXXXXCXCXXXXXXXXXXXC

SEQ ID NO: 238 - protein, 34 aa, Artificial Sequence
  EGF domain monomer sequence
  MOD_RES (2)...(2): Xaa = Ala, Asp, Glu, Phe, Gly, His, Ile, Lys, Leu, Asn, Pro, Gln, Arg, Ser, Thr, Val or Trp
  MOD_RES (3)...(3): Xaa = Ala, Asp, Glu, Gly, His, Lys, Leu, Met, Asn, Pro, Arg, Ser, Thr or Tyr
  MOD_RES (4)...(4): Xaa = Ala, Asp, Glu, Gly, His, Lys, Leu, Met, Asn, Pro, Gln, Arg, Ser, Thr, Val or Trp
  MOD_RES (5)...(5): Xaa = Ala, Glu, Gly, Met, Asn, Pro, Gln, Arg, Ser, Thr or Tyr
  MOD_RES (7)...(7): Xaa = Ala, Asp, Glu, Gly, His, Lys, Asn, Pro, Gln, Ser, Thr or Val
  MOD_RES (8)...(8): Xaa = Phe, Gly, His, Leu, Asn, Gln, Ser, Thr or Tyr
  MOD_RES (9)...(9): Xaa = Ala, Asp, Glu, Phe, Gly, His, Ile, Lys, Leu, Asn, Gln, Arg, Ser, Thr, Val or Tyr
  MOD_RES (11)...(11): Xaa = Ala, Asp, Glu, Phe, Gly, His, Ile, Lys, Leu, Met, Asn, Gln, Arg, Ser, Thr, Val, Trp or Tyr
  MOD_RES (12)...(12): Xaa = Ala, Asp, Glu, Lys, Leu, Asn, Pro, Gln, Arg, Ser, Thr or Val
  MOD_RES (13)...(13): Xaa = Ala, Cys, Asp, Glu, Phe, Gly, His, Ile, Lys, Leu, Met, Asn, Pro, Gln, Arg, Ser, Thr, Val or Tyr
  MOD_RES (14)...(14): Xaa = Ala, Asp, Glu, Phe, Gly, His, Ile, Lys, Leu, Met, Asn, Pro, Gln, Arg, Ser, Thr, Val, Trp or Tyr
  MOD_RES (15)...(15): Xaa = Ala, Asp, Glu, Phe, Gly, His, Ile, Lys, Leu, Asn, Pro, Gln, Arg, Ser, Thr, Val or Trp
  MOD_RES (16)...(16): Xaa = Ala, Asp, Glu, Gly, His, Lys, Leu, Met, Asn, Gln, Arg, Ser, Thr, Val, Trp or Tyr
  MOD_RES (17)...(17): Xaa = Ala, Phe, His, Ile, Leu, Pro, Arg, Thr, Val or Tyr
  MOD_RES (18)...(18): Xaa = Ala, Asp, Glu, Phe, His, Ile, Lys, Leu, Met, Asn, Gln, Arg, Ser, Thr, Val, Trp or Tyr
  MOD_RES (20)...(20): Xaa = Ala, Asp, Glu, Phe, Gly, His, Ile, Lys, Leu, Met, Asn, Pro, Gln, Arg, Ser, Thr, Val, Trp or Tyr
  MOD_RES (22)...(22): Xaa = Ala, Asp, Glu, Phe, Gly, His, Ile, Lys, Leu, Asn, Pro, Gln, Arg, Ser, Thr, Val or Tyr
  MOD_RES (23)...(23): Xaa = Ala, Asp, Glu, Phe, His, Ile, Lys, Leu, Met, Asn, Pro, Gln, Arg, Ser, Thr or Val
  MOD_RES (24)...(24): Xaa = Asp, Glu, Gly, Asn, Pro or Ser
  MOD_RES (25)...(25): Xaa = Ala, Asp, Glu, Phe, His, Leu, Met, Gln, Arg, Ser, Thr, Trp or Tyr
  MOD_RES (26)...(26): Xaa = Ala, Asp, Glu, Phe, Gly, His, Ile, Lys, Leu, Met, Asn, Gln, Arg, Ser, Thr, Val or Tyr
  MOD_RES (27)...(27): Xaa = Ala, Phe, Gly, Ile, Lys, Leu, Met, Pro, Gln, Arg, Ser, Thr, Val, Trp or Tyr
  MOD_RES (28)...(28): Xaa = Ala, Asp, Glu, Phe, Gly, His, Lys, Leu, Met, Asn, Pro, Gln, Arg, Ser, Thr, Val or Trp
  MOD_RES (29)...(29): Xaa = Ala, Asp, Glu, Gly, Ile, Lys, Leu, Met, Asn, Pro, Gln, Arg, Ser, Thr, Val or Tyr
  MOD_RES (30)...(30): Xaa = Ala, Asp, Glu, Phe, Gly, His, Ile, Lys, Leu, Met, Asn, Gln, Ser, Thr or Val
  MOD_RES (31)...(31): Xaa = Glu, Phe, Gly, His, Ile, Lys, Leu, Met, Asn, Pro, Gln, Arg, Ser, Thr or Trp
  MOD_RES (32)...(32): Xaa = Ala, Asp, Glu, Phe, Gly, His, Lys, Leu, Met, Asn, Pro, Gln, Arg, Ser, Thr, Val or Tyr
  MOD_RES (33)...(33): Xaa = Ala, Asp, Glu, Phe, Gly, His, Ile, Lys, Met, Asn, Gln, Arg, Ser, Thr, Val or Tyr
CXXXXCXXXCXXXXXXXXCXCXXXXXXXXXXXXC

SEQ ID NO: 239 - protein, 31 aa, Artificial Sequence
  EGF domain monomer sequence
  MOD_RES (2)...(2): Xaa = Ala, Asp, Glu, Gly, Ile, Lys, Leu, Gln, Arg, Ser, Thr or Val
  MOD_RES (3)...(3): Xaa = Ala, Asp, Glu, Phe, Gly, His, Ile, Lys, Leu, Met, Asn, Pro, Gln, Arg, Ser, Thr or Val
  MOD_RES (4)...(4): Xaa = Ala, Glu, Phe, Gly, His, Leu, Asn, Pro, Gln, Arg, Ser, Thr, Trp or Tyr
  MOD_RES (5)...(5): Xaa = Ala, Asp, Glu, Phe, Gly, His, Ile, Lys, Leu, Asn, Pro, Arg, Ser or Thr
  MOD_RES (6)...(6): Xaa = Ala, Phe, Gly, Ile, Lys, Leu, Met, Asn, Pro, Gln, Arg, Ser, Thr, Val or Tyr
  MOD_RES (8)...(8): Xaa = Ala, Asp, Glu, Gly, His, Lys, Asn, Pro, Gln, Ser, Thr or Val
  MOD_RES (9)...(9): Xaa = Phe, Gly, His, Leu, Asn, Gln, Ser, Thr or Tyr
  MOD_RES (10)...(10): Xaa = Ala, Asp, Glu, Phe, Gly, His, Ile, Lys, Leu, Asn, Gln, Arg, Ser, Thr, Val or Tyr
  MOD_RES (12)...(12): Xaa = Ala, Asp, Glu, Phe, Gly, His, Ile, Lys, Leu, Met, Asn, Gln, Arg, Ser, Thr, Val, Trp or Tyr
  MOD_RES (13)...(13): Xaa = Ala, Asp, Glu, Lys, Leu, Asn, Pro, Gln, Arg, Ser, Thr or Val
  MOD_RES (14)...(14): Xaa = Ala, Cys, Asp, Glu, Phe, Gly, His, Ile, Lys, Leu, Met, Asn, Pro, Gln, Arg, Ser, Thr, Val or Tyr
  MOD_RES (15)...(15): Xaa = Ala, Asp, Glu, Phe, Gly, His, Ile, Lys, Leu, Met, Asn, Pro, Gln, Arg, Ser, Thr, Val, Trp or Tyr
  MOD_RES (16)...(16): Xaa = Ala, Asp, Glu, Phe, Gly, His, Ile, Lys, Leu, Asn, Pro, Gln, Arg, Ser, Thr, Val or Trp
  MOD_RES (17)...(17): Xaa = Ala, Asp, Glu, Gly, His, Lys, Leu, Met, Asn, Gln, Arg, Ser, Thr, Val, Trp or Tyr
  MOD_RES (18)...(18): Xaa = Ala, Phe, His, Ile, Leu, Pro, Arg, Thr, Val or Tyr
  MOD_RES (19)...(19): Xaa = Ala, Asp, Glu, Phe, His, Ile, Lys, Leu, Met, Asn, Gln, Arg, Ser, Thr, Val, Trp or Tyr
  MOD_RES (21)...(21): Xaa = Ala, Asp, Glu, Phe, Gly, His, Ile, Lys, Leu, Met, Asn, Pro, Gln, Arg, Ser, Thr, Val, Trp or Tyr
  MOD_RES (23)...(23): Xaa = Ala, Asp, Glu, Phe, His, Lys, Leu, Met, Asn, Pro, Gln, Arg, Ser, Thr, Val, Trp or Tyr
  MOD_RES (24)...(24): Xaa = Ala, Asp, Glu, Phe, Gly, His, Lys, Leu, Asn, Pro, Gln, Arg, Ser, Thr, Val or Tyr
  MOD_RES (25)...(25): Xaa = Ala, Glu, Gly, His, Lys, Leu, Asn, Pro, Arg, Ser, Thr or Tyr
  MOD_RES (26)...(26): Xaa = Phe, His, Ile, Leu, Met, Arg, Thr, Trp or Tyr
  MOD_RES (27)...(27): Xaa = Ala, Asp, Glu, Phe, Gly, His, Ile, Lys, Leu, Met, Asn, Gln, Arg, Ser, Thr, Val or Tyr
  MOD_RES (28)...(28): Xaa = Asp, Gly or Ser
  MOD_RES (29)...(29): Xaa = Ala, Asp, Glu, Phe, His, Ile, Lys, Leu, Asn, Pro, Gln, Arg, Ser, Thr, Val or Tyr
  MOD_RES (30)...(30): Xaa = Ala, Asp, Glu, Phe, His, Ile, Lys, Leu, Met, Asn, Gln, Arg, Ser, Thr or Tyr
CXXXXXCXXXCXXXXXXXXCXCXXXXXXXXC

SEQ ID NO: 240 - protein, 32 aa, Artificial Sequence
  EGF domain monomer sequence
  MOD_RES (2)...(2): Xaa = Ala, Asp, Glu, Gly, Ile, Lys, Leu, Gln, Arg, Ser, Thr or Val
  MOD_RES (3)...(3): Xaa = Ala, Asp, Glu, Phe, Gly, His, Ile, Lys, Leu, Met, Asn, Pro, Gln, Arg, Ser, Thr or Val
  MOD_RES (4)...(4): Xaa = Ala, Glu, Phe, Gly, His, Leu, Asn, Pro, Gln, Arg, Ser, Thr, Trp or Tyr
  MOD_RES (5)...(5): Xaa = Ala, Asp, Glu, Phe, Gly, His, Ile, Lys, Leu, Asn, Pro, Arg, Ser or Thr
  MOD_RES (6)...(6): Xaa = Ala, Phe, Gly, Ile, Lys, Leu, Met, Asn, Pro, Gln, Arg, Ser, Thr, Val or Tyr
  MOD_RES (8)...(8): Xaa = Ala, Asp, Glu, Gly, His, Lys, Asn, Pro, Gln, Ser, Thr or Val
  MOD_RES (9)...(9): Xaa = Phe, Gly, His, Leu, Asn, Gln, Ser, Thr or Tyr
  MOD_RES (10)...(10): Xaa = Ala, Asp, Glu, Phe, Gly, His, Ile, Lys, Leu, Asn, Gln, Arg, Ser, Thr, Val or Tyr
  MOD_RES (12)...(12): Xaa = Ala, Asp, Glu, Phe, Gly, His, Ile, Lys, Leu, Met, Asn, Gln, Arg, Ser, Thr, Val, Trp or Tyr
  MOD_RES (13)...(13): Xaa = Ala, Asp, Glu, Lys, Leu, Asn, Pro, Gln, Arg, Ser, Thr or Val
  MOD_RES (14)...(14): Xaa = Ala, Cys, Asp, Glu, Phe, Gly, His, Ile, Lys, Leu, Met, Asn, Pro, Gln, Arg, Ser, Thr, Val or Tyr
  MOD_RES (15)...(15): Xaa = Ala, Asp, Glu, Phe, Gly, His, Ile, Lys, Leu, Met, Asn, Pro, Gln, Arg, Ser, Thr, Val, Trp or Tyr
  MOD_RES (16)...(16): Xaa = Ala, Asp, Glu, Phe, Gly, His, Ile, Lys, Leu, Asn, Pro, Gln, Arg, Ser, Thr, Val or Trp
  MOD_RES (17)...(17): Xaa = Ala, Asp, Glu, Gly, His, Lys, Leu, Met, Asn, Gln, Arg, Ser, Thr, Val, Trp or Tyr
  MOD_RES (18)...(18): Xaa = Ala, Phe, His, Ile, Leu, Pro, Arg, Thr, Val or Tyr
  MOD_RES (19)...(19): Xaa = Ala, Asp, Glu, Phe, His, Ile, Lys, Leu, Met, Asn, Gln, Arg, Ser, Thr, Val, Trp or Tyr
  MOD_RES (21)...(21): Xaa = Ala, Asp, Glu, Phe, Gly, His, Ile, Lys, Leu, Met, Asn, Pro, Gln, Arg, Ser, Thr, Val, Trp or Tyr
  MOD_RES (23)...(23): Xaa = Ala, Asp, Glu, Phe, Gly, His, Ile, Lys, Leu, Asn, Pro, Gln, Arg, Ser, Thr, Val or Tyr
  MOD_RES (24)...(24): Xaa = Ala, Asp, Glu, Phe, His, Ile, Lys, Leu, Met, Asn, Pro, Gln, Arg, Ser, Thr or Val
  MOD_RES (25)...(25): Xaa = Asp, Glu, Gly, Asn, Pro or Ser
  MOD_RES (26)...(26): Xaa = Ala, Asp, Glu, Phe, His, Leu, Met, Gln, Arg, Ser, Thr, Trp or Tyr
  MOD_RES (27)...(27): Xaa = Ala, Asp, Glu, Phe, Gly, His, Ile, Lys, Leu, Met, Asn, Gln, Arg, Ser, Thr, Val or Tyr
  MOD_RES (28)...(28): Xaa = Ala, Phe, Gly, Ile, Lys, Leu, Met, Pro, Gln, Arg, Ser, Thr, Val, Trp or Tyr
  MOD_RES (29)...(29): Xaa = Ala, Asp, Glu, Phe, Gly, His, Lys, Leu, Met, Asn, Pro, Gln, Arg, Ser, Thr, Val or Trp
  MOD_RES (30)...(30): Xaa = Ala, Asp, Glu, Gly, Ile, Lys, Leu, Met, Asn, Pro, Gln, Arg, Ser, Thr, Val or Tyr
  MOD_RES (31)...(31): Xaa = Ala, Asp, Glu, Phe, Gly, His, Ile, Lys, Leu, Met, Asn, Gln, Ser, Thr or Val
CXXXXXCXXXCXXXXXXXXCXCXXXXXXXXXC

SEQ ID NO: 241 - protein, 33 aa, Artificial Sequence
  EGF domain monomer sequence
  MOD_RES (2)...(2): Xaa = Ala, Asp, Glu, Gly, Ile, Lys, Leu, Gln, Arg, Ser, Thr or Val
  MOD_RES (3)...(3): Xaa = Ala, Asp, Glu, Phe, Gly, His, Ile, Lys, Leu, Met, Asn, Pro, Gln, Arg, Ser, Thr or Val
  MOD_RES (4)...(4): Xaa = Ala, Glu, Phe, Gly, His, Leu, Asn, Pro, Gln, Arg, Ser, Thr, Trp or Tyr
  MOD_RES (5)...(5): Xaa = Ala, Asp, Glu, Phe, Gly, His, Ile, Lys, Leu, Asn, Pro, Arg, Ser or Thr
  MOD_RES (6)...(6): Xaa = Ala, Phe, Gly, Ile, Lys, Leu, Met, Asn, Pro, Gln, Arg, Ser, Thr, Val or Tyr
  MOD_RES (8)...(8): Xaa = Ala, Asp, Glu, Gly, His, Lys, Asn, Pro, Gln, Ser, Thr or Val
  MOD_RES (9)...(9): Xaa = Phe, Gly, His, Leu, Asn, Gln, Ser, Thr or Tyr
  MOD_RES (10)...(10): Xaa = Ala, Asp, Glu, Phe, Gly, His, Ile, Lys, Leu, Asn, Gln, Arg, Ser, Thr, Val or Tyr
  MOD_RES (12)...(12): Xaa = Ala, Asp, Glu, Phe, Gly, His, Ile, Lys, Leu, Met, Asn, Gln, Arg, Ser, Thr, Val, Trp or Tyr
  MOD_RES (13)...(13): Xaa = Ala, Asp, Glu, Lys, Leu, Asn, Pro, Gln, Arg, Ser, Thr or Val
  MOD_RES (14)...(14): Xaa = Ala, Cys, Asp, Glu, Phe, Gly, His, Ile, Lys, Leu, Met, Asn, Pro, Gln, Arg, Ser, Thr, Val or Tyr
  MOD_RES (15)...(15): Xaa = Ala, Asp, Glu, Phe, Gly, His, Ile, Lys, Leu, Met, Asn, Pro, Gln, Arg, Ser, Thr, Val, Trp or Tyr
  MOD_RES (16)...(16): Xaa = Ala, Asp, Glu, Phe, Gly, His, Ile, Lys, Leu, Asn, Pro, Gln, Arg, Ser, Thr, Val or Trp
  MOD_RES (17)...(17): Xaa = Ala, Asp, Glu, Gly, His, Lys, Leu, Met, Asn, Gln, Arg, Ser, Thr, Val, Trp or Tyr
  MOD_RES (18)...(18): Xaa = Ala, Phe, His, Ile, Leu, Pro, Arg, Thr, Val or Tyr
  MOD_RES (19)...(19): Xaa = Ala, Asp, Glu, Phe, His, Ile, Lys, Leu, Met, Asn, Gln, Arg, Ser, Thr, Val, Trp or Tyr
  MOD_RES (21)...(21): Xaa = Ala, Asp, Glu, Phe, Gly, His, Ile, Lys, Leu, Met, Asn, Pro, Gln, Arg, Ser, Thr, Val, Trp or Tyr
  MOD_RES (23)...(23): Xaa = Ala, Asp, Glu, Phe, Gly, His, Ile, Lys, Leu, Asn, Pro, Gln, Arg, Ser, Thr, Val or Tyr
  MOD_RES (24)...(24): Xaa = Ala, Asp, Glu, Phe, His, Ile, Lys, Leu, Met, Asn, Pro, Gln, Arg, Ser, Thr or Val
  MOD_RES (25)...(25): Xaa = Asp, Glu, Gly, Asn, Pro or Ser
  MOD_RES (26)...(26): Xaa = Ala, Asp, Glu, Phe, His, Leu, Met, Gln, Arg, Ser, Thr, Trp or Tyr
  MOD_RES (27)...(27): Xaa = Ala, Asp, Glu, Phe, Gly, His, Ile, Lys, Leu, Met, Asn, Gln, Arg, Ser, Thr, Val or Tyr
  MOD_RES (28)...(28): Xaa = Ala, Phe, Gly, Ile, Lys, Leu, Met, Pro, Gln, Arg, Ser, Thr, Val, Trp or Tyr
  MOD_RES (29)...(29): Xaa = Ala, Asp, Glu, Phe, Gly, His, Lys, Leu, Met, Asn, Pro, Gln, Arg, Ser, Thr, Val or Trp
  MOD_RES (30)...(30): Xaa = Ala, Asp, Glu, Gly, Ile, Lys, Leu, Met, Asn, Pro, Gln, Arg, Ser, Thr, Val or Tyr
  MOD_RES (31)...(31): Xaa = Ala, Asp, Glu, Phe, Gly, His, Ile, Lys, Leu, Met, Asn, Gln, Ser, Thr or Val
  MOD_RES (32)...(32): Xaa = Glu, Phe, Gly, His, Ile, Lys, Leu, Met, Asn, Pro, Gln, Arg, Ser, Thr or Trp
CXXXXXCXXXCXXXXXXXXCXCXXXXXXXXXXC

SEQ ID NO: 242 - protein, 34 aa, Artificial Sequence
  EGF domain monomer sequence
  MOD_RES (2)...(2): Xaa = Ala, Asp, Glu, Gly, Ile, Lys, Leu, Gln, Arg, Ser, Thr or Val
  MOD_RES (3)...(3): Xaa = Ala, Asp, Glu, Phe, Gly, His, Ile, Lys, Leu, Met, Asn, Pro, Gln, Arg, Ser, Thr or Val
  MOD_RES (4)...(4): Xaa = Ala, Glu, Phe, Gly, His, Leu, Asn, Pro, Gln, Arg, Ser, Thr, Trp or Tyr
  MOD_RES (5)...(5): Xaa = Ala, Asp, Glu, Phe, Gly, His, Ile, Lys, Leu, Asn, Pro, Arg, Ser or Thr
  MOD_RES (6)...(6): Xaa = Ala, Phe, Gly, Ile, Lys, Leu, Met, Asn, Pro, Gln, Arg, Ser, Thr, Val or Tyr
  MOD_RES (8)...(8): Xaa = Ala, Asp, Glu, Gly, His, Lys, Asn, Pro, Gln, Ser, Thr or Val
  MOD_RES (9)...(9): Xaa = Phe, Gly, His, Leu, Asn, Gln, Ser, Thr or Tyr
  MOD_RES (10)...(10): Xaa = Ala, Asp, Glu, Phe, Gly, His, Ile, Lys, Leu, Asn, Gln, Arg, Ser, Thr, Val or Tyr
  MOD_RES (12)...(12): Xaa = Ala, Asp, Glu, Phe, Gly, His, Ile, Lys, Leu, Met, Asn, Gln, Arg, Ser, Thr, Val, Trp or Tyr
  MOD_RES (13)...(13): Xaa = Ala, Asp, Glu, Lys, Leu, Asn, Pro, Gln, Arg, Ser, Thr or Val
  MOD_RES (14)...(14): Xaa = Ala, Cys, Asp, Glu, Phe, Gly, His, Ile, Lys, Leu, Met, Asn, Pro, Gln, Arg, Ser, Thr, Val or Tyr
  MOD_RES (15)...(15): Xaa = Ala, Asp, Glu, Phe, Gly, His, Ile, Lys, Leu, Met, Asn, Pro, Gln, Arg, Ser, Thr, Val, Trp or Tyr
  MOD_RES (16)...(16): Xaa = Ala, Asp, Glu, Phe, Gly, His, Ile, Lys, Leu, Asn, Pro, Gln, Arg, Ser, Thr, Val or Trp
  MOD_RES (17)...(17): Xaa = Ala, Asp, Glu, Gly, His, Lys, Leu, Met, Asn, Gln, Arg, Ser, Thr, Val, Trp or Tyr
  MOD_RES (18)...(18): Xaa = Ala, Phe, His, Ile, Leu, Pro, Arg, Thr, Val or Tyr
  MOD_RES (19)...(19): Xaa = Ala, Asp, Glu, Phe, His, Ile, Lys, Leu, Met, Asn, Gln, Arg, Ser, Thr, Val, Trp or Tyr
  MOD_RES (21)...(21): Xaa = Ala, Asp, Glu, Phe, Gly, His, Ile, Lys, Leu, Met, Asn, Pro, Gln, Arg, Ser, Thr, Val, Trp or Tyr
  MOD_RES (23)...(23): Xaa = Ala, Asp, Glu, Phe, Gly, His, Ile, Lys, Leu, Asn, Pro, Gln, Arg, Ser, Thr, Val or Tyr
  MOD_RES (24)...(24): Xaa = Ala, Asp, Glu, Phe, His, Ile, Lys, Leu, Met, Asn, Pro, Gln, Arg, Ser, Thr or Val
  MOD_RES (25)...(25): Xaa = Asp, Glu, Gly, Asn, Pro or Ser
  MOD_RES (26)...(26): Xaa = Ala, Asp, Glu, Phe, His, Leu, Met, Gln, Arg, Ser, Thr, Trp or Tyr
  MOD_RES (27)...(27): Xaa = Ala, Asp, Glu, Phe, Gly, His, Ile, Lys, Leu, Met, Asn, Gln, Arg, Ser, Thr, Val or Tyr
  MOD_RES (28)...(28): Xaa = Ala, Phe, Gly, Ile, Lys, Leu, Met, Pro, Gln, Arg, Ser, Thr, Val, Trp or Tyr
  MOD_RES (29)...(29): Xaa = Ala, Asp, Glu, Phe, Gly, His, Lys, Leu, Met, Asn, Pro, Gln, Arg, Ser, Thr, Val or Trp
  MOD_RES (30)...(30): Xaa = Ala, Asp, Glu, Gly, Ile, Lys, Leu, Met, Asn, Pro, Gln, Arg, Ser, Thr, Val or Tyr
  MOD_RES (31)...(31): Xaa = Ala, Asp, Glu, Phe, Gly, His, Ile, Lys, Leu, Met, Asn, Gln, Ser, Thr or Val
  MOD_RES (32)...(32): Xaa = Glu, Phe, Gly, His, Ile, Lys, Leu, Met, Asn, Pro, Gln, Arg, Ser, Thr or Trp
  MOD_RES (33)...(33): Xaa = Ala, Asp, Glu, Phe, Gly, His, Lys, Leu, Met, Asn, Pro, Gln, Arg, Ser, Thr, Val or Tyr
CXXXXXCXXXCXXXXXXXXCXCXXXXXXXXXXXC

SEQ ID NO: 243 - protein, 35 aa, Artificial Sequence
  EGF domain monomer sequence
  MOD_RES (2)...(2): Xaa = Ala, Asp, Glu, Gly, Ile, Lys, Leu, Gln, Arg, Ser, Thr or Val
  MOD_RES (3)...(3): Xaa = Ala, Asp, Glu, Phe, Gly, His, Ile, Lys, Leu, Met, Asn, Pro, Gln, Arg, Ser, Thr or Val
  MOD_RES (4)...(4): Xaa = Ala, Glu, Phe, Gly, His, Leu, Asn, Pro, Gln, Arg, Ser, Thr, Trp or Tyr
  MOD_RES (5)...(5): Xaa = Ala, Asp, Glu, Phe, Gly, His, Ile, Lys, Leu, Asn, Pro, Arg, Ser or Thr
  MOD_RES (6)...(6): Xaa = Ala, Phe, Gly, Ile, Lys, Leu, Met, Asn, Pro, Gln, Arg, Ser, Thr, Val or Tyr
  MOD_RES (8)...(8): Xaa = Ala, Asp, Glu, Gly, His, Lys, Asn, Pro, Gln, Ser, Thr or Val
  MOD_RES (9)...(9): Xaa = Phe, Gly, His, Leu, Asn, Gln, Ser, Thr or Tyr
  MOD_RES (10)...(10): Xaa = Ala, Asp, Glu, Phe, Gly, His, Ile, Lys, Leu, Asn, Gln, Arg, Ser, Thr, Val or Tyr
  MOD_RES (12)...(12): Xaa = Ala, Asp, Glu, Phe, Gly, His, Ile, Lys, Leu, Met, Asn, Gln, Arg, Ser, Thr, Val, Trp or Tyr
  MOD_RES (13)...(13): Xaa = Ala, Asp, Glu, Lys, Leu, Asn, Pro, Gln, Arg, Ser, Thr or Val
  MOD_RES (14)...(14): Xaa = Ala, Cys, Asp, Glu, Phe, Gly, His, Ile, Lys, Leu, Met, Asn, Pro, Gln, Arg, Ser, Thr, Val or Tyr
  MOD_RES (15)...(15): Xaa = Ala, Asp, Glu, Phe, Gly, His, Ile, Lys, Leu, Met, Asn, Pro, Gln, Arg, Ser, Thr, Val, Trp or Tyr
  MOD_RES (16)...(16): Xaa = Ala, Asp, Glu, Phe, Gly, His, Ile, Lys, Leu, Asn, Pro, Gln, Arg, Ser, Thr, Val or Trp
  MOD_RES (17)...(17): Xaa = Ala, Asp, Glu, Gly, His, Lys, Leu, Met, Asn, Gln, Arg, Ser, Thr, Val, Trp or Tyr
  MOD_RES (18)...(18): Xaa = Ala, Phe, His, Ile, Leu, Pro, Arg, Thr, Val or Tyr
  MOD_RES (19)...(19): Xaa = Ala, Asp, Glu, Phe, His, Ile, Lys, Leu, Met, Asn, Gln, Arg, Ser, Thr, Val, Trp or Tyr
  MOD_RES (21)...(21): Xaa = Ala, Asp, Glu, Phe, Gly, His, Ile, Lys, Leu, Met, Asn, Pro, Gln, Arg, Ser, Thr, Val, Trp or Tyr
  MOD_RES (23)...(23): Xaa = Ala, Asp, Glu, Phe, Gly, His, Ile, Lys, Leu, Asn, Pro, Gln, Arg, Ser, Thr, Val or Tyr
  MOD_RES (24)...(24): Xaa = Ala, Asp, Glu, Phe, His, Ile, Lys, Leu, Met, Asn, Pro, Gln, Arg, Ser, Thr or Val
  MOD_RES (25)...(25): Xaa = Asp, Glu, Gly, Asn, Pro or Ser
  MOD_RES (26)...(26): Xaa = Ala, Asp, Glu, Phe, His, Leu, Met, Gln, Arg, Ser, Thr, Trp or Tyr
  MOD_RES (27)...(27): Xaa = Ala, Asp, Glu, Phe, Gly, His, Ile, Lys, Leu, Met, Asn, Gln, Arg, Ser, Thr, Val or Tyr
  MOD_RES (28)...(28): Xaa = Ala, Phe, Gly, Ile, Lys, Leu, Met, Pro, Gln, Arg, Ser, Thr, Val, Trp or Tyr
  MOD_RES (29)...(29): Xaa = Ala, Asp, Glu, Phe, Gly, His, Lys, Leu, Met, Asn, Pro, Gln, Arg, Ser, Thr, Val or Trp
  MOD_RES (30)...(30): Xaa = Ala, Asp, Glu, Gly, Ile, Lys, Leu, Met, Asn, Pro, Gln, Arg, Ser, Thr, Val or Tyr
  MOD_RES (31)...(31): Xaa = Ala, Asp, Glu, Phe, Gly, His, Ile, Lys, Leu, Met, Asn, Gln, Ser, Thr or Val
  MOD_RES (32)...(32): Xaa = Glu, Phe, Gly, His, Ile, Lys, Leu, Met, Asn, Pro, Gln, Arg, Ser, Thr or Trp
  MOD_RES (33)...(33): Xaa = Ala, Asp, Glu, Phe, Gly, His, Lys, Leu, Met, Asn, Pro, Gln, Arg, Ser, Thr, Val or Tyr
  MOD_RES (34)...(34): Xaa = Ala, Asp, Glu, Phe, Gly, His, Ile, Lys, Met, Asn, Gln, Arg, Ser, Thr, Val or Tyr
CXXXXXCXXXCXXXXXXXXCXCXXXXXXXXXXXXC

SEQ ID NO: 244 - protein, 32 aa, Artificial Sequence
  EGF domain monomer sequence
  MOD_RES (2)...(2): Xaa = Ala, Asp, Glu, Phe, Gly, Ile, Lys, Leu, Met, Asn, Pro, Gln, Arg, Ser, Thr, Val or Tyr
  MOD_RES (3)...(3): Xaa = Ala, Asp, Glu, Phe, Gly, His, Ile, Lys, Leu, Met, Asn, Pro, Gln, Arg, Ser, Thr, Val or Tyr
  MOD_RES (4)...(4): Xaa = Ala, Asp, Glu, Phe, Gly, His, Ile, Lys, Leu, Met, Asn, Pro, Gln, Arg, Ser, Thr, Val or Trp
  MOD_RES (5)...(5): Xaa = Ala, Asp, Glu, Phe, Gly, His, Ile, Lys, Leu, Met, Asn, Pro, Gln, Arg, Ser, Thr or Val
  MOD_RES (6)...(6): Xaa = Ala, Asp, Glu, Phe, Gly, His, Ile, Lys, Leu, Asn, Pro, Gln, Arg, Ser, Val or Tyr
  MOD_RES (7)...(7): Xaa = Ala, Asp, Glu, Gly, Ile, Lys, Leu, Met, Asn, Pro, Gln, Arg, Ser, Thr, Val or Tyr
  MOD_RES (9)...(9): Xaa = Ala, Asp, Glu, Gly, His, Lys, Asn, Pro, Gln, Ser, Thr or Val
  MOD_RES (10)...(10): Xaa = Phe, Gly, His, Leu, Asn, Gln, Ser, Thr or Tyr
  MOD_RES (11)...(11): Xaa = Ala, Asp, Glu, Phe, Gly, His, Ile, Lys, Leu, Asn, Gln, Arg, Ser, Thr, Val or Tyr
  MOD_RES (13)...(13): Xaa = Ala, Asp, Glu, Phe, Gly, His, Ile, Lys, Leu, Met, Asn, Gln, Arg, Ser, Thr, Val, Trp or Tyr
  MOD_RES (14)...(14): Xaa = Ala, Asp, Glu, Lys, Leu, Asn, Pro, Gln, Arg, Ser, Thr or Val
  MOD_RES (15)...(15): Xaa = Ala, Cys, Asp, Glu, Phe, Gly, His, Ile, Lys, Leu, Met, Asn, Pro, Gln, Arg, Ser, Thr, Val or Tyr
  MOD_RES (16)...(16): Xaa = Ala, Asp, Glu, Phe, Gly, His, Ile, Lys, Leu, Met, Asn, Pro, Gln, Arg, Ser, Thr, Val, Trp or Tyr
  MOD_RES (17)...(17): Xaa = Ala, Asp, Glu, Phe, Gly, His, Ile, Lys, Leu, Asn, Pro, Gln, Arg, Ser, Thr, Val or Trp
  MOD_RES (18)...(18): Xaa = Ala, Asp, Glu, Gly, His, Lys, Leu, Met, Asn, Gln, Arg, Ser, Thr, Val, Trp or Tyr
  MOD_RES (19)...(19): Xaa = Ala, Phe, His, Ile, Leu, Pro, Arg, Thr, Val or Tyr
  MOD_RES (20)...(20): Xaa = Ala, Asp, Glu, Phe, His, Ile, Lys, Leu, Met, Asn, Gln, Arg, Ser, Thr, Val, Trp or Tyr
  MOD_RES (22)...(22): Xaa = Ala, Asp, Glu, Phe, Gly, His, Ile, Lys, Leu, Met, Asn, Pro, Gln, Arg, Ser, Thr, Val, Trp or Tyr
  MOD_RES (24)...(24): Xaa = Ala, Asp, Glu, Phe, His, Lys, Leu, Met, Asn, Pro, Gln, Arg, Ser, Thr, Val, Trp or Tyr
  MOD_RES (25)...(25): Xaa = Ala, Asp, Glu, Phe, Gly, His, Lys, Leu, Asn, Pro, Gln, Arg, Ser, Thr, Val or Tyr
  MOD_RES (26)...(26): Xaa = Ala, Glu, Gly, His, Lys, Leu, Asn, Pro, Arg, Ser, Thr or Tyr
  MOD_RES (27)...(27): Xaa = Phe, His, Ile, Leu, Met, Arg, Thr, Trp or Tyr
  MOD_RES (28)...(28): Xaa = Ala, Asp, Glu, Phe, Gly, His, Ile, Lys, Leu, Met, Asn, Gln, Arg, Ser, Thr, Val or Tyr
  MOD_RES (29)...(29): Xaa = Asp, Gly or Ser
  MOD_RES (30)...(30): Xaa = Ala, Asp, Glu, Phe, His, Ile, Lys, Leu, Asn, Pro, Gln, Arg, Ser, Thr, Val or Tyr
  MOD_RES (31)...(31): Xaa = Ala, Asp, Glu, Phe, His, Ile, Lys, Leu, Met, Asn, Gln, Arg, Ser, Thr or Tyr
CXXXXXXCXXXCXXXXXXXXCXCXXXXXXXXC

SEQ ID NO: 245 - protein, 33 aa, Artificial Sequence
  EGF domain monomer sequence
  MOD_RES (2)...(2): Xaa = Ala, Asp, Glu, Phe, Gly, Ile, Lys, Leu, Met, Asn, Pro, Gln, Arg, Ser, Thr, Val or Tyr
  MOD_RES (3)...(3): Xaa = Ala, Asp, Glu, Phe, Gly, His, Ile, Lys, Leu, Met, Asn, Pro, Gln, Arg, Ser, Thr, Val or Tyr
  MOD_RES (4)...(4): Xaa = Ala, Asp, Glu, Phe, Gly, His, Ile, Lys, Leu, Met, Asn, Pro, Gln, Arg, Ser, Thr, Val or Trp
  MOD_RES (5)...(5): Xaa = Ala, Asp, Glu, Phe, Gly, His, Ile, Lys, Leu, Met, Asn, Pro, Gln, Arg, Ser, Thr or Val
  MOD_RES (6)...(6): Xaa = Ala, Asp, Glu, Phe, Gly, His, Ile, Lys, Leu, Asn, Pro, Gln, Arg, Ser, Val or Tyr
  MOD_RES (7)...(7): Xaa = Ala, Asp, Glu, Gly, Ile, Lys, Leu, Met, Asn, Pro, Gln, Arg, Ser, Thr, Val or Tyr
  MOD_RES (9)...(9): Xaa = Ala, Asp, Glu, Gly, His, Lys, Asn, Pro, Gln, Ser, Thr or Val
  MOD_RES (10)...(10): Xaa = Phe, Gly, His, Leu, Asn, Gln, Ser, Thr or Tyr
  MOD_RES (11)...(11): Xaa = Ala, Asp, Glu, Phe, Gly, His, Ile, Lys, Leu, Asn, Gln, Arg, Ser, Thr, Val or Tyr
  MOD_RES (13)...(13): Xaa = Ala, Asp, Glu, Phe, Gly, His, Ile, Lys, Leu, Met, Asn, Gln, Arg, Ser, Thr, Val, Trp or Tyr
  MOD_RES (14)...(14): Xaa = Ala, Asp, Glu, Lys, Leu, Asn, Pro, Gln, Arg, Ser, Thr or Val
  MOD_RES (15)...(15): Xaa = Ala, Cys, Asp, Glu, Phe, Gly, His, Ile, Lys, Leu, Met, Asn, Pro, Gln, Arg, Ser, Thr, Val or Tyr
  MOD_RES (16)...(16): Xaa = Ala, Asp, Glu, Phe, Gly, His, Ile, Lys, Leu, Met, Asn, Pro, Gln, Arg, Ser, Thr, Val, Trp or Tyr
  MOD_RES (17)...(17): Xaa = Ala, Asp, Glu, Phe, Gly, His, Ile, Lys, Leu, Asn, Pro, Gln, Arg, Ser, Thr, Val or Trp
  MOD_RES (18)...(18): Xaa = Ala, Asp, Glu, Gly, His, Lys, Leu, Met, Asn, Gln, Arg, Ser, Thr, Val, Trp or Tyr
  MOD_RES (19)...(19): Xaa = Ala, Phe, His, Ile, Leu, Pro, Arg, Thr, Val or Tyr
  MOD_RES (20)...(20): Xaa = Ala, Asp, Glu, Phe, His, Ile, Lys, Leu, Met, Asn, Gln, Arg, Ser, Thr, Val, Trp or Tyr
  MOD_RES (22)...(22): Xaa = Ala, Asp, Glu, Phe, Gly, His, Ile, Lys, Leu, Met, Asn, Pro, Gln, Arg, Ser, Thr, Val, Trp or Tyr
  MOD_RES (24)...(24): Xaa = Ala, Asp, Glu, Phe, Gly, His, Ile, Lys, Leu, Asn, Pro, Gln, Arg, Ser, Thr, Val or Tyr
  MOD_RES (25)...(25): Xaa = Ala, Asp, Glu, Phe, His, Ile, Lys, Leu, Met, Asn, Pro, Gln, Arg, Ser, Thr or Val
  MOD_RES (26)...(26): Xaa = Asp, Glu, Gly, Asn, Pro or Ser
  MOD_RES (27)...(27): Xaa = Ala, Asp, Glu, Phe, His, Leu, Met, Gln, Arg, Ser, Thr, Trp or Tyr
  MOD_RES (28)...(28): Xaa = Ala, Asp, Glu, Phe, Gly, His, Ile, Lys, Leu, Met, Asn, Gln, Arg, Ser, Thr, Val or Tyr
  MOD_RES (29)...(29): Xaa = Ala, Phe, Gly, Ile, Lys, Leu, Met, Pro, Gln, Arg, Ser, Thr, Val, Trp or Tyr
  MOD_RES (30)...(30): Xaa = Ala, Asp, Glu, Phe, Gly, His, Lys, Leu, Met, Asn, Pro, Gln, Arg, Ser, Thr, Val or Trp
  MOD_RES (31)...(31): Xaa = Ala, Asp, Glu, Gly, Ile, Lys, Leu, Met, Asn, Pro, Gln, Arg, Ser, Thr, Val or Tyr
  MOD_RES (32)...(32): Xaa = Ala, Asp, Glu, Phe, Gly, His, Ile, Lys, Leu, Met, Asn, Gln, Ser, Thr or Val
CXXXXXXCXXXCXXXXXXXXCXCXXXXXXXXXC

SEQ ID NO: 246 - protein, 34 aa, Artificial Sequence
  EGF domain monomer sequence
  MOD_RES (2)...(2): Xaa = Ala, Asp, Glu, Phe, Gly, Ile, Lys, Leu, Met, Asn, Pro, Gln, Arg, Ser, Thr, Val or Tyr
  MOD_RES (3)...(3): Xaa = Ala, Asp, Glu, Phe, Gly, His, Ile, Lys, Leu, Met, Asn, Pro, Gln, Arg, Ser, Thr, Val or Tyr
  MOD_RES (4)...(4): Xaa = Ala, Asp, Glu, Phe, Gly, His, Ile, Lys, Leu, Met, Asn, Pro, Gln, Arg, Ser, Thr, Val or Trp
  MOD_RES (5)...(5): Xaa = Ala, Asp, Glu, Phe, Gly, His, Ile, Lys, Leu, Met, Asn, Pro, Gln, Arg, Ser, Thr or Val
  MOD_RES (6)...(6): Xaa = Ala, Asp, Glu, Phe, Gly, His, Ile, Lys, Leu, Asn, Pro, Gln, Arg, Ser, Val or Tyr
  MOD_RES (7)...(7): Xaa = Ala, Asp, Glu, Gly, Ile, Lys, Leu, Met, Asn, Pro, Gln, Arg, Ser, Thr, Val or Tyr
  MOD_RES (9)...(9): Xaa = Ala, Asp, Glu, Gly, His, Lys, Asn, Pro, Gln, Ser, Thr or Val
  MOD_RES (10)...(10): Xaa = Phe, Gly, His, Leu, Asn, Gln, Ser, Thr or Tyr
  MOD_RES (11)...(11): Xaa = Ala, Asp, Glu, Phe, Gly, His, Ile, Lys, Leu, Asn, Gln, Arg, Ser, Thr, Val or Tyr
  MOD_RES (13)...(13): Xaa = Ala, Asp, Glu, Phe, Gly, His, Ile, Lys, Leu, Met, Asn, Gln, Arg, Ser, Thr, Val, Trp or Tyr
  MOD_RES (14)...(14): Xaa = Ala, Asp, Glu, Lys, Leu, Asn, Pro, Gln, Arg, Ser, Thr or Val
  MOD_RES (15)...(15): Xaa = Ala, Cys, Asp, Glu, Phe, Gly, His, Ile, Lys, Leu, Met, Asn, Pro, Gln, Arg, Ser, Thr, Val or Tyr
  MOD_RES (16)...(16): Xaa = Ala, Asp, Glu, Phe, Gly, His, Ile, Lys, Leu, Met, Asn, Pro, Gln, Arg, Ser, Thr, Val, Trp or Tyr
  MOD_RES (17)...(17): Xaa = Ala, Asp, Glu, Phe, Gly, His, Ile, Lys, Leu, Asn, Pro, Gln, Arg, Ser, Thr, Val or Trp
  MOD_RES (18)...(18): Xaa = Ala, Asp, Glu, Gly, His, Lys, Leu, Met, Asn, Gln, Arg, Ser, Thr, Val, Trp or Tyr
  MOD_RES (19)...(19): Xaa = Ala, Phe, His, Ile, Leu, Pro, Arg, Thr, Val or Tyr
  MOD_RES (20)...(20): Xaa = Ala, Asp, Glu, Phe, His, Ile, Lys, Leu, Met, Asn, Gln, Arg, Ser, Thr, Val, Trp or Tyr
  MOD_RES (22)...(22): Xaa = Ala, Asp, Glu, Phe, Gly, His, Ile, Lys, Leu, Met, Asn, Pro, Gln, Arg, Ser, Thr, Val, Trp or Tyr
  MOD_RES (24)...(24): Xaa = Ala, Asp, Glu, Phe, Gly, His, Ile, Lys, Leu, Asn, Pro, Gln, Arg, Ser, Thr, Val or Tyr
  MOD_RES (25)...(25): Xaa = Ala, Asp, Glu, Phe, His, Ile, Lys, Leu, Met, Asn, Pro, Gln, Arg, Ser, Thr or Val
  MOD_RES (26)...(26): Xaa = Asp, Glu, Gly, Asn, Pro or Ser
  MOD_RES (27)...(27): Xaa = Ala, Asp, Glu, Phe, His, Leu, Met, Gln, Arg, Ser, Thr, Trp or Tyr
  MOD_RES (28)...(28): Xaa = Ala, Asp, Glu, Phe, Gly, His, Ile, Lys, Leu, Met, Asn, Gln, Arg, Ser, Thr, Val or Tyr
  MOD_RES (29)...(29): Xaa = Ala, Phe, Gly, Ile, Lys, Leu, Met, Pro, Gln, Arg, Ser, Thr, Val, Trp or Tyr
  MOD_RES (30)...(30): Xaa = Ala, Asp, Glu, Phe, Gly, His, Lys, Leu, Met, Asn, Pro, Gln, Arg, Ser, Thr, Val or Trp
  MOD_RES (31)...(31): Xaa = Ala, Asp, Glu, Gly, Ile, Lys, Leu, Met, Asn, Pro, Gln, Arg, Ser, Thr, Val or Tyr
  MOD_RES (32)...(32): Xaa = Ala, Asp, Glu, Phe, Gly, His, Ile, Lys, Leu, Met, Asn, Gln, Ser, Thr or Val
  MOD_RES (33)...(33): Xaa = Glu, Phe, Gly, His, Ile, Lys, Leu, Met, Asn, Pro, Gln, Arg, Ser, Thr or Trp
CXXXXXXCXXXCXXXXXXXXCXCXXXXXXXXXXC

SEQ ID NO: 247 - protein, 35 aa, Artificial Sequence
  EGF domain monomer sequence
  MOD_RES (2)...(2): Xaa = Ala, Asp, Glu, Phe, Gly, Ile, Lys, Leu, Met, Asn, Pro, Gln, Arg, Ser, Thr, Val or Tyr
  MOD_RES (3)...(3): Xaa = Ala, Asp, Glu, Phe, Gly, His, Ile, Lys, Leu, Met, Asn, Pro, Gln, Arg, Ser, Thr, Val or Tyr
  MOD_RES (4)...(4): Xaa = Ala, Asp, Glu, Phe, Gly, His, Ile, Lys, Leu, Met, Asn, Pro, Gln, Arg, Ser, Thr, Val or Trp
  MOD_RES (5)...(5): Xaa = Ala, Asp, Glu, Phe, Gly, His, Ile, Lys, Leu, Met, Asn, Pro, Gln, Arg, Ser, Thr or Val
  MOD_RES (6)...(6): Xaa = Ala, Asp, Glu, Phe, Gly, His, Ile, Lys, Leu, Asn, Pro, Gln, Arg, Ser, Val or Tyr
  MOD_RES (7)...(7): Xaa = Ala, Asp, Glu, Gly, Ile, Lys, Leu, Met, Asn, Pro, Gln, Arg, Ser, Thr, Val or Tyr
  MOD_RES (9)...(9): Xaa = Ala, Asp, Glu, Gly, His, Lys, Asn, Pro, Gln, Ser, Thr or Val
  MOD_RES (10)...(10): Xaa = Phe, Gly, His, Leu, Asn, Gln, Ser, Thr or Tyr
  MOD_RES (11)...(11): Xaa = Ala, Asp, Glu, Phe, Gly, His, Ile, Lys, Leu, Asn, Gln, Arg, Ser, Thr, Val or Tyr
  MOD_RES (13)...(13): Xaa = Ala, Asp, Glu, Phe, Gly, His, Ile, Lys, Leu, Met, Asn, Gln, Arg, Ser, Thr, Val, Trp or Tyr
  MOD_RES (14)...(14): Xaa = Ala, Asp, Glu, Lys, Leu, Asn, Pro, Gln, Arg, Ser, Thr or Val
  MOD_RES (15)...(15): Xaa = Ala, Cys, Asp, Glu, Phe, Gly, His, Ile, Lys, Leu, Met, Asn, Pro, Gln, Arg, Ser, Thr, Val or Tyr
  MOD_RES (16)...(16): Xaa = Ala, Asp, Glu, Phe, Gly, His, Ile, Lys, Leu, Met, Asn, Pro, Gln, Arg, Ser, Thr, Val, Trp or Tyr
  MOD_RES (17)...(17): Xaa = Ala, Asp, Glu, Phe, Gly, His, Ile, Lys, Leu, Asn, Pro, Gln, Arg, Ser, Thr, Val or Trp
  MOD_RES (18)...(18): Xaa = Ala, Asp, Glu, Gly, His, Lys, Leu, Met, Asn, Gln, Arg, Ser, Thr, Val, Trp or Tyr
  MOD_RES (19)...(19): Xaa = Ala, Phe, His, Ile, Leu, Pro, Arg, Thr, Val or Tyr
  MOD_RES (20)...(20): Xaa = Ala, Asp, Glu, Phe, His, Ile, Lys, Leu, Met, Asn, Gln, Arg, Ser, Thr, Val, Trp or Tyr
  MOD_RES (22)...(22): Xaa = Ala, Asp, Glu, Phe, Gly, His, Ile, Lys, Leu, Met, Asn, Pro, Gln, Arg, Ser, Thr, Val, Trp or Tyr
  MOD_RES (24)...(24): Xaa = Ala, Asp, Glu, Phe, Gly, His, Ile, Lys, Leu, Asn, Pro, Gln, Arg, Ser, Thr, Val or Tyr
  MOD_RES (25)...(25): Xaa = Ala, Asp, Glu, Phe, His, Ile, Lys, Leu, Met, Asn, Pro, Gln, Arg, Ser, Thr or Val
  MOD_RES (26)...(26): Xaa = Asp, Glu, Gly, Asn, Pro or Ser
  MOD_RES (27)...(27): Xaa = Ala, Asp, Glu, Phe, His, Leu, Met, Gln, Arg, Ser, Thr, Trp or Tyr
  MOD_RES (28)...(28): Xaa = Ala, Asp, Glu, Phe, Gly, His, Ile, Lys, Leu, Met, Asn, Gln, Arg, Ser, Thr, Val or Tyr
  MOD_RES (29)...(29): Xaa = Ala, Phe, Gly, Ile, Lys, Leu, Met, Pro, Gln, Arg, Ser, Thr, Val, Trp or Tyr
  MOD_RES (30)...(30): Xaa = Ala, Asp, Glu, Phe, Gly, His, Lys, Leu, Met, Asn, Pro, Gln, Arg, Ser, Thr, Val or Trp
  MOD_RES (31)...(31): Xaa = Ala, Asp, Glu, Gly, Ile, Lys, Leu, Met, Asn, Pro, Gln, Arg, Ser, Thr, Val or Tyr
  MOD_RES (32)...(32): Xaa = Ala, Asp, Glu, Phe, Gly, His, Ile, Lys, Leu, Met, Asn, Gln, Ser, Thr or Val
  MOD_RES (33)...(33): Xaa = Glu, Phe, Gly, His, Ile, Lys, Leu, Met, Asn, Pro, Gln, Arg, Ser, Thr or Trp
  MOD_RES (34)...(34): Xaa = Ala, Asp, Glu, Phe, Gly, His, Lys, Leu, Met, Asn, Pro, Gln, Arg, Ser, Thr, Val or Tyr
CXXXXXXCXXXCXXXXXXXXCXCXXXXXXXXXXXC

SEQ ID NO: 248 - protein, 36 aa, Artificial Sequence
  EGF domain monomer sequence
  MOD_RES (2)...(2): Xaa = Ala, Asp, Glu, Phe, Gly, Ile, Lys, Leu, Met, Asn, Pro, Gln, Arg, Ser, Thr, Val or Tyr
  MOD_RES (3)...(3): Xaa = Ala, Asp, Glu, Phe, Gly, His, Ile, Lys, Leu, Met, Asn, Pro, Gln, Arg, Ser, Thr, Val or Tyr
  MOD_RES (4)...(4): Xaa = Ala, Asp, Glu, Phe, Gly, His, Ile, Lys, Leu, Met, Asn, Pro, Gln, Arg, Ser, Thr, Val or Trp
  MOD_RES (5)...(5): Xaa = Ala, Asp, Glu, Phe, Gly, His, Ile, Lys, Leu, Met, Asn, Pro, Gln, Arg, Ser, Thr or Val
  MOD_RES (6)...(6): Xaa = Ala, Asp, Glu, Phe, Gly, His, Ile, Lys, Leu, Asn, Pro, Gln, Arg, Ser, Val or Tyr
  MOD_RES (7)...(7): Xaa = Ala, Asp, Glu, Gly, Ile, Lys, Leu, Met, Asn, Pro, Gln, Arg, Ser, Thr, Val or Tyr
  MOD_RES (9)...(9): Xaa = Ala, Asp, Glu, Gly, His, Lys, Asn, Pro, Gln, Ser, Thr or Val
  MOD_RES (10)...(10): Xaa = Phe, Gly, His, Leu, Asn, Gln, Ser, Thr or Tyr
  MOD_RES (11)...(11): Xaa = Ala, Asp, Glu, Phe, Gly, His, Ile, Lys, Leu, Asn, Gln, Arg, Ser, Thr, Val or Tyr
  MOD_RES (13)...(13): Xaa = Ala, Asp, Glu, Phe, Gly, His, Ile, Lys, Leu, Met, Asn, Gln, Arg, Ser, Thr, Val, Trp or Tyr
  MOD_RES (14)...(14): Xaa = Ala, Asp, Glu, Lys, Leu, Asn, Pro, Gln, Arg, Ser, Thr or Val
  MOD_RES (15)...(15): Xaa = Ala, Cys, Asp, Glu, Phe, Gly, His, Ile, Lys, Leu, Met, Asn, Pro, Gln, Arg, Ser, Thr, Val or Tyr
  MOD_RES (16)...(16): Xaa = Ala, Asp, Glu, Phe, Gly, His, Ile, Lys, Leu, Met, Asn, Pro, Gln, Arg, Ser, Thr, Val, Trp or Tyr
  MOD_RES (17)...(17): Xaa = Ala, Asp, Glu, Phe, Gly, His, Ile, Lys, Leu, Asn, Pro, Gln, Arg, Ser, Thr, Val or Trp
  MOD_RES (18)...(18): Xaa = Ala, Asp, Glu, Gly, His, Lys, Leu, Met, Asn, Gln, Arg, Ser, Thr, Val, Trp or Tyr
  MOD_RES (19)...(19): Xaa = Ala, Phe, His, Ile, Leu, Pro, Arg, Thr, Val or Tyr
  MOD_RES (20)...(20): Xaa = Ala, Asp, Glu, Phe, His, Ile, Lys, Leu, Met, Asn, Gln, Arg, Ser, Thr, Val, Trp or Tyr
  MOD_RES (22)...(22): Xaa = Ala, Asp, Glu, Phe, Gly, His, Ile, Lys, Leu, Met, Asn, Pro, Gln, Arg, Ser, Thr, Val, Trp or Tyr
  MOD_RES (24)...(24): Xaa = Ala, Asp, Glu, Phe, Gly, His, Ile, Lys, Leu, Asn, Pro, Gln, Arg, Ser, Thr, Val or Tyr
  MOD_RES (25)...(25): Xaa = Ala, Asp, Glu, Phe, His, Ile, Lys, Leu, Met, Asn, Pro, Gln, Arg, Ser, Thr or Val
  MOD_RES (26)...(26): Xaa = Asp, Glu, Gly, Asn, Pro or Ser
  MOD_RES (27)...(27): Xaa = Ala, Asp, Glu, Phe, His, Leu, Met, Gln, Arg, Ser, Thr, Trp or Tyr
  MOD_RES (28)...(28): Xaa = Ala, Asp, Glu, Phe, Gly, His, Ile, Lys, Leu, Met, Asn, Gln, Arg, Ser, Thr, Val or Tyr
  MOD_RES (29)...(29): Xaa = Ala, Phe, Gly, Ile, Lys, Leu, Met, Pro, Gln, Arg, Ser, Thr, Val, Trp or Tyr
  MOD_RES (30)...(30): Xaa = Ala, Asp, Glu, Phe, Gly, His, Lys, Leu, Met, Asn, Pro, Gln, Arg, Ser, Thr, Val or Trp
  MOD_RES (31)...(31): Xaa = Ala, Asp, Glu, Gly, Ile, Lys, Leu, Met, Asn, Pro, Gln, Arg, Ser, Thr, Val or Tyr
  MOD_RES (32)...(32): Xaa = Ala, Asp, Glu, Phe, Gly, His, Ile, Lys, Leu, Met, Asn, Gln, Ser, Thr or Val
  MOD_RES (33)...(33): Xaa = Glu, Phe, Gly, His, Ile, Lys, Leu, Met, Asn, Pro, Gln, Arg, Ser, Thr or Trp
  MOD_RES (34)...(34): Xaa = Ala, Asp, Glu, Phe, Gly, His, Lys, Leu, Met, Asn, Pro, Gln, Arg, Ser, Thr, Val or Tyr
  MOD_RES (35)...(35): Xaa = Ala, Asp, Glu, Phe, Gly, His, Ile, Lys, Met, Asn, Gln, Arg, Ser, Thr, Val or Tyr
CXXXXXXCXXXCXXXXXXXXCXCXXXXXXXXXXXXC

SEQ ID NO: 249 - protein, 31 aa, Artificial Sequence
  EGF domain monomer sequence
  MOD_RES (2)...(2): Xaa = Ala, Asp, Glu, Phe, Gly, His, Ile, Lys, Leu, Asn, Pro, Gln, Arg, Ser, Thr, Val or Trp
  MOD_RES (3)...(3): Xaa = Ala, Asp, Glu, Gly, His, Lys, Leu, Met, Asn, Pro, Arg, Ser, Thr or Tyr
  MOD_RES (4)...(4): Xaa = Ala, Asp, Glu, Gly, His, Lys, Leu, Met, Asn, Pro, Gln, Arg, Ser, Thr, Val or Trp
  MOD_RES (5)...(5): Xaa = Ala, Glu, Gly, Met, Asn, Pro, Gln, Arg, Ser, Thr or Tyr
  MOD_RES (7)...(7): Xaa = Ala, Asp, Glu, Phe, Gly, His, Ile, Lys, Leu, Met, Asn, Pro, Gln, Arg, Ser, Thr or Val
  MOD_RES (8)...(8): Xaa = Ala, Asp, Glu, Phe, Gly, His, Lys, Leu, Asn, Pro, Gln, Arg, Ser, Thr or Tyr
  MOD_RES (9)...(9): Xaa = Ala, Gly or Thr
  MOD_RES (10)...(10): Xaa = Ala, Asp, Glu, Phe, His, Ile, Lys, Leu, Met, Asn, Gln, Arg, Ser, Thr or Val
  MOD_RES (12)...(12): Xaa = Ala, Asp, Glu, Phe, Gly, His, Ile, Lys, Leu, Met, Asn, Gln, Arg, Ser, Thr, Val, Trp or Tyr
  MOD_RES (13)...(13): Xaa = Ala, Asp, Glu, Lys, Leu, Asn, Pro, Gln, Arg, Ser, Thr or Val
  MOD_RES (14)...(14): Xaa = Ala, Cys, Asp, Glu, Phe, Gly, His, Ile, Lys, Leu, Met, Asn, Pro, Gln, Arg, Ser, Thr, Val or Tyr
  MOD_RES (15)...(15): Xaa = Ala, Asp, Glu, Phe, Gly, His, Ile, Lys, Leu, Met, Asn, Pro, Gln, Arg, Ser, Thr, Val, Trp or Tyr
  MOD_RES (16)...(16): Xaa = Ala, Asp, Glu, Phe, Gly, His, Ile, Lys, Leu, Asn, Pro, Gln, Arg, Ser, Thr, Val or Trp
  MOD_RES (17)...(17): Xaa = Ala, Asp, Glu, Gly, His, Lys, Leu, Met, Asn, Gln, Arg, Ser, Thr, Val, Trp or Tyr
  MOD_RES (18)...(18): Xaa = Ala, Phe, His, Ile, Leu, Pro, Arg, Thr, Val or Tyr
  MOD_RES (19)...(19): Xaa = Ala, Asp, Glu, Phe, His, Ile, Lys, Leu, Met, Asn, Gln, Arg, Ser, Thr, Val, Trp or Tyr
  MOD_RES (21)...(21): Xaa = Ala, Asp, Glu, Phe, Gly, His, Ile, Lys, Leu, Met, Asn, Pro, Gln, Arg, Ser, Thr, Val, Trp or Tyr
  MOD_RES (23)...(23): Xaa = Ala, Asp, Glu, Phe, His, Lys, Leu, Met, Asn, Pro, Gln, Arg, Ser, Thr, Val, Trp or Tyr
  MOD_RES (24)...(24): Xaa = Ala, Asp, Glu, Phe, Gly, His, Lys, Leu, Asn, Pro, Gln, Arg, Ser, Thr, Val or Tyr
  MOD_RES (25)...(25): Xaa = Ala, Glu, Gly, His, Lys, Leu, Asn, Pro, Arg, Ser, Thr or Tyr
  MOD_RES (26)...(26): Xaa = Phe, His, Ile, Leu, Met, Arg, Thr, Trp or Tyr
  MOD_RES (27)...(27): Xaa = Ala, Asp, Glu, Phe, Gly, His, Ile, Lys, Leu, Met, Asn, Gln, Arg, Ser, Thr, Val or Tyr
  MOD_RES (28)...(28): Xaa = Asp, Gly or Ser
  MOD_RES (29)...(29): Xaa = Ala, Asp, Glu, Phe, His, Ile, Lys, Leu, Asn, Pro, Gln, Arg, Ser, Thr, Val or Tyr
  MOD_RES (30)...(30): Xaa = Ala, Asp, Glu, Phe, His, Ile, Lys, Leu, Met, Asn, Gln, Arg, Ser, Thr or Tyr
CXXXXCXXXXCXXXXXXXXCXCXXXXXXXXC

SEQ ID NO: 250 - protein, 32 aa, Artificial Sequence
  EGF domain monomer sequence
  MOD_RES (2)...(2): Xaa = Ala, Asp, Glu, Phe, Gly, His, Ile, Lys, Leu, Asn, Pro, Gln, Arg, Ser, Thr, Val or Trp
  MOD_RES (3)...(3): Xaa = Ala, Asp, Glu, Gly, His, Lys, Leu, Met, Asn, Pro, Arg, Ser, Thr or Tyr
  MOD_RES (4)...(4): Xaa = Ala, Asp, Glu, Gly, His, Lys, Leu, Met, Asn, Pro, Gln, Arg, Ser, Thr, Val or Trp
  MOD_RES (5)...(5): Xaa = Ala, Glu, Gly, Met, Asn, Pro, Gln, Arg, Ser, Thr or Tyr
  MOD_RES (7)...(7): Xaa = Ala, Asp, Glu, Phe, Gly, His, Ile, Lys, Leu, Met, Asn, Pro, Gln, Arg, Ser, Thr or Val
  MOD_RES (8)...(8): Xaa = Ala, Asp, Glu, Phe, Gly, His, Lys, Leu, Asn, Pro, Gln, Arg, Ser, Thr or Tyr
  MOD_RES (9)...(9): Xaa = Ala, Gly or Thr
  MOD_RES (10)...(10): Xaa = Ala, Asp, Glu, Phe, His, Ile, Lys, Leu, Met, Asn, Gln, Arg, Ser, Thr or Val
  MOD_RES (12)...(12): Xaa = Ala, Asp, Glu, Phe, Gly, His, Ile, Lys, Leu, Met, Asn, Gln, Arg, Ser, Thr, Val, Trp or Tyr
  MOD_RES (13)...(13): Xaa = Ala, Asp, Glu, Lys, Leu, Asn, Pro, Gln, Arg, Ser, Thr or Val
  MOD_RES (14)...(14): Xaa = Ala, Cys, Asp, Glu, Phe, Gly, His, Ile, Lys, Leu, Met, Asn, Pro, Gln, Arg, Ser, Thr, Val or Tyr
  MOD_RES (15)...(15): Xaa = Ala, Asp, Glu, Phe, Gly, His, Ile, Lys, Leu, Met, Asn, Pro, Gln, Arg, Ser, Thr, Val, Trp or Tyr
  MOD_RES (16)...(16): Xaa = Ala, Asp, Glu, Phe, Gly, His, Ile, Lys, Leu, Asn, Pro, Gln, Arg, Ser, Thr, Val or Trp
  MOD_RES (17)...(17): Xaa = Ala, Asp, Glu, Gly, His, Lys, Leu, Met, Asn, Gln, Arg, Ser, Thr, Val, Trp or Tyr
  MOD_RES (18)...(18): Xaa = Ala, Phe, His, Ile, Leu, Pro, Arg, Thr, Val or Tyr
  MOD_RES (19)...(19): Xaa = Ala, Asp, Glu, Phe, His, Ile, Lys, Leu, Met, Asn, Gln, Arg, Ser, Thr, Val, Trp or Tyr
  MOD_RES (21)...(21): Xaa = Ala, Asp, Glu, Phe, Gly, His, Ile, Lys, Leu, Met, Asn, Pro, Gln, Arg, Ser, Thr, Val, Trp or Tyr
  MOD_RES (23)...(23): Xaa = Ala, Asp, Glu, Phe, Gly, His, Ile, Lys, Leu, Asn, Pro, Gln, Arg, Ser, Thr, Val or Tyr
  MOD_RES (24)...(24): Xaa = Ala, Asp, Glu, Phe, His, Ile, Lys, Leu, Met, Asn, Pro, Gln, Arg, Ser, Thr or Val
  MOD_RES (25)...(25): Xaa = Asp, Glu, Gly, Asn, Pro or Ser
  MOD_RES (26)...(26): Xaa = Ala, Asp, Glu, Phe, His, Leu, Met, Gln, Arg, Ser, Thr, Trp or Tyr
  MOD_RES (27)...(27): Xaa = Ala, Asp, Glu, Phe, Gly, His, Ile, Lys, Leu, Met, Asn, Gln, Arg, Ser, Thr, Val or Tyr
  MOD_RES (28)...(28): Xaa = Ala, Phe, Gly, Ile, Lys, Leu, Met, Pro, Gln, Arg, Ser, Thr, Val, Trp or Tyr
  MOD_RES (29)...(29): Xaa = Ala, Asp, Glu, Phe, Gly, His, Lys, Leu, Met, Asn, Pro, Gln, Arg, Ser, Thr, Val or Trp
  MOD_RES (30)...(30): Xaa = Ala, Asp, Glu, Gly, Ile, Lys, Leu, Met, Asn, Pro, Gln, Arg, Ser, Thr, Val or Tyr
  MOD_RES (31)...(31): Xaa = Ala, Asp, Glu, Phe, Gly, His, Ile, Lys, Leu, Met, Asn, Gln, Ser, Thr or Val
CXXXXCXXXXCXXXXXXXXCXCXXXXXXXXXC

SEQ ID NO: 251 - protein, 33 aa, Artificial Sequence
  EGF domain monomer sequence
  MOD_RES (2)...(2): Xaa = Ala, Asp, Glu, Phe, Gly, His, Ile, Lys, Leu, Asn, Pro, Gln, Arg, Ser, Thr, Val or Trp
  MOD_RES (3)...(3): Xaa = Ala, Asp, Glu, Gly, His, Lys, Leu, Met, Asn, Pro, Arg, Ser, Thr or Tyr
  MOD_RES (4)...(4): Xaa = Ala, Asp, Glu, Gly, His, Lys, Leu, Met, Asn, Pro, Gln, Arg, Ser, Thr, Val or Trp
  MOD_RES (5)...(5): Xaa = Ala, Glu, Gly, Met, Asn, Pro, Gln, Arg, Ser, Thr or Tyr
  MOD_RES (7)...(7): Xaa = Ala, Asp, Glu, Phe, Gly, His, Ile, Lys, Leu, Met, Asn, Pro, Gln, Arg, Ser, Thr or Val
  MOD_RES (8)...(8): Xaa = Ala, Asp, Glu, Phe, Gly, His, Lys, Leu, Asn, Pro, Gln, Arg, Ser, Thr or Tyr
  MOD_RES (9)...(9): Xaa = Ala, Gly or Thr
  MOD_RES (10)...(10): Xaa = Ala, Asp, Glu, Phe, His, Ile, Lys, Leu, Met, Asn, Gln, Arg, Ser, Thr or Val
  MOD_RES (12)...(12): Xaa = Ala, Asp, Glu, Phe, Gly, His, Ile, Lys, Leu, Met, Asn, Gln, Arg, Ser, Thr, Val, Trp or Tyr
  MOD_RES (13)...(13): Xaa = Ala, Asp, Glu, Lys, Leu, Asn, Pro, Gln, Arg, Ser, Thr or Val
  MOD_RES (14)...(14): Xaa = Ala, Cys, Asp, Glu, Phe, Gly, His, Ile, Lys, Leu, Met, Asn, Pro, Gln, Arg, Ser, Thr, Val or Tyr
  MOD_RES (15)...(15): Xaa = Ala, Asp, Glu, Phe, Gly, His, Ile, Lys, Leu, Met, Asn, Pro, Gln, Arg, Ser, Thr, Val, Trp or Tyr
  MOD_RES (16)...(16): Xaa = Ala, Asp, Glu, Phe, Gly, His, Ile, Lys, Leu, Asn, Pro, Gln, Arg, Ser, Thr, Val or Trp
  MOD_RES (17)...(17): Xaa = Ala, Asp, Glu, Gly, His, Lys, Leu, Met, Asn, Gln, Arg, Ser, Thr, Val, Trp or Tyr
  MOD_RES (18)...(18): Xaa = Ala, Phe, His, Ile, Leu, Pro, Arg, Thr, Val or Tyr
  MOD_RES (19)...(19): Xaa = Ala, Asp, Glu, Phe, His, Ile, Lys, Leu, Met, Asn, Gln, Arg, Ser, Thr, Val, Trp or Tyr
  MOD_RES (21)...(21): Xaa = Ala, Asp, Glu, Phe, Gly, His, Ile, Lys, Leu, Met, Asn, Pro, Gln, Arg, Ser, Thr, Val, Trp or Tyr
  MOD_RES (23)...(23): Xaa = Ala, Asp, Glu, Phe, Gly, His, Ile, Lys, Leu, Asn, Pro, Gln, Arg, Ser, Thr, Val or Tyr
  MOD_RES (24)...(24): Xaa = Ala, Asp, Glu, Phe, His, Ile, Lys, Leu, Met, Asn, Pro, Gln, Arg, Ser, Thr or Val
  MOD_RES (25)...(25): Xaa = Asp, Glu, Gly, Asn, Pro or Ser
  MOD_RES (26)...(26): Xaa = Ala, Asp, Glu, Phe, His, Leu, Met, Gln, Arg, Ser, Thr, Trp or Tyr
  MOD_RES (27)...(27): Xaa = Ala, Asp, Glu, Phe, Gly, His, Ile, Lys, Leu, Met, Asn, Gln, Arg, Ser, Thr, Val or Tyr
  MOD_RES (28)...(28): Xaa = Ala, Phe, Gly, Ile, Lys, Leu, Met, Pro, Gln, Arg, Ser, Thr, Val, Trp or Tyr
  MOD_RES (29)...(29): Xaa = Ala, Asp, Glu, Phe, Gly, His, Lys, Leu, Met, Asn, Pro, Gln, Arg, Ser, Thr, Val or Trp
  MOD_RES (30)...(30): Xaa = Ala, Asp, Glu, Gly, Ile, Lys, Leu, Met, Asn, Pro, Gln, Arg, Ser, Thr, Val or Tyr
  MOD_RES (31)...(31): Xaa = Ala, Asp, Glu, Phe, Gly, His, Ile, Lys, Leu, Met, Asn, Gln, Ser, Thr or Val
  MOD_RES (32)...(32): Xaa = Glu, Phe, Gly, His, Ile, Lys, Leu, Met, Asn, Pro, Gln, Arg, Ser, Thr or Trp
CXXXXCXXXXCXXXXXXXXCXCXXXXXXXXXXC

SEQ ID NO: 252 - protein, 34 aa, Artificial Sequence
  EGF domain monomer sequence
  MOD_RES (2)...(2): Xaa = Ala, Asp, Glu, Phe, Gly, His, Ile, Lys, Leu, Asn, Pro, Gln, Arg, Ser, Thr, Val or Trp
  MOD_RES (3)...(3): Xaa = Ala, Asp, Glu, Gly, His, Lys, Leu, Met, Asn, Pro, Arg, Ser, Thr or Tyr
  MOD_RES (4)...(4): Xaa = Ala, Asp, Glu, Gly, His, Lys, Leu, Met, Asn, Pro, Gln, Arg, Ser, Thr, Val or Trp
  MOD_RES (5)...(5): Xaa = Ala, Glu, Gly, Met, Asn, Pro, Gln, Arg, Ser, Thr or Tyr
  MOD_RES (7)...(7): Xaa = Ala, Asp, Glu, Phe, Gly, His, Ile, Lys, Leu, Met, Asn, Pro, Gln, Arg, Ser, Thr or Val
  MOD_RES (8)...(8): Xaa = Ala, Asp, Glu, Phe, Gly, His, Lys, Leu, Asn, Pro, Gln, Arg, Ser, Thr or Tyr
  MOD_RES (9)...(9): Xaa = Ala, Gly or Thr
  MOD_RES (10)...(10): Xaa = Ala, Asp, Glu, Phe, His, Ile, Lys, Leu, Met, Asn, Gln, Arg, Ser, Thr or Val
  MOD_RES (12)...(12): Xaa = Ala, Asp, Glu, Phe, Gly, His, Ile, Lys, Leu, Met, Asn, Gln, Arg, Ser, Thr, Val, Trp or Tyr
  MOD_RES (13)...(13): Xaa = Ala, Asp, Glu, Lys, Leu, Asn, Pro, Gln, Arg, Ser, Thr or Val
  MOD_RES (14)...(14): Xaa = Ala, Cys, Asp, Glu, Phe, Gly, His, Ile, Lys, Leu, Met, Asn, Pro, Gln, Arg, Ser, Thr, Val or Tyr
  MOD_RES (15)...(15): Xaa = Ala, Asp, Glu, Phe, Gly, His, Ile, Lys, Leu, Met, Asn, Pro, Gln, Arg, Ser, Thr, Val, Trp or Tyr
  MOD_RES (16)...(16): Xaa = Ala, Asp, Glu, Phe, Gly, His, Ile, Lys, Leu, Asn, Pro, Gln, Arg, Ser, Thr, Val or Trp
  MOD_RES (17)...(17): Xaa = Ala, Asp, Glu, Gly, His, Lys, Leu, Met, Asn, Gln, Arg, Ser, Thr, Val, Trp or Tyr
  MOD_RES (18)...(18): Xaa = Ala, Phe, His, Ile, Leu, Pro, Arg, Thr, Val or Tyr
  MOD_RES (19)...(19): Xaa = Ala, Asp, Glu, Phe, His, Ile, Lys, Leu, Met, Asn, Gln, Arg, Ser, Thr, Val, Trp or Tyr
  MOD_RES (21)...(21): Xaa = Ala, Asp, Glu, Phe, Gly, His, Ile, Lys, Leu, Met, Asn, Pro, Gln, Arg, Ser, Thr, Val, Trp or Tyr
  MOD_RES (23)...(23): Xaa = Ala, Asp, Glu, Phe, Gly, His, Ile, Lys, Leu, Asn, Pro, Gln, Arg, Ser, Thr, Val or Tyr
  MOD_RES (24)...(24): Xaa = Ala, Asp, Glu, Phe, His, Ile, Lys, Leu, Met, Asn, Pro, Gln, Arg, Ser, Thr or Val
  MOD_RES (25)...(25): Xaa = Asp, Glu, Gly, Asn, Pro or Ser
  MOD_RES (26)...(26): Xaa = Ala, Asp, Glu, Phe, His, Leu, Met, Gln, Arg, Ser, Thr, Trp or Tyr
  MOD_RES (27)...(27): Xaa = Ala, Asp, Glu, Phe, Gly, His, Ile, Lys, Leu, Met, Asn, Gln, Arg, Ser, Thr, Val or Tyr
  MOD_RES (28)...(28): Xaa = Ala, Phe, Gly, Ile, Lys, Leu, Met, Pro, Gln, Arg, Ser, Thr, Val, Trp or Tyr
  MOD_RES (29)...(29): Xaa = Ala, Asp, Glu, Phe, Gly, His, Lys, Leu, Met, Asn, Pro, Gln, Arg, Ser, Thr, Val or Trp
  MOD_RES (30)...(30): Xaa = Ala, Asp, Glu, Gly, Ile, Lys, Leu, Met, Asn, Pro, Gln, Arg, Ser, Thr, Val or Tyr
  MOD_RES (31)...(31): Xaa = Ala, Asp, Glu, Phe, Gly, His, Ile, Lys, Leu, Met, Asn, Gln, Ser, Thr or Val
  MOD_RES (32)...(32): Xaa = Glu, Phe, Gly, His, Ile, Lys, Leu, Met, Asn, Pro, Gln, Arg, Ser, Thr or Trp
  MOD_RES (33)...(33): Xaa = Ala, Asp, Glu, Phe, Gly, His, Lys, Leu, Met, Asn, Pro, Gln, Arg, Ser, Thr, Val or Tyr
CXXXXCXXXXCXXXXXXXXCXCXXXXXXXXXXXC

SEQ ID NO: 253 - protein, 35 aa, Artificial Sequence
  EGF domain monomer sequence
  MOD_RES (2)...(2): Xaa = Ala, Asp, Glu, Phe, Gly, His, Ile, Lys, Leu, Asn, Pro, Gln, Arg, Ser, Thr, Val or Trp
  MOD_RES (3)...(3): Xaa = Ala, Asp, Glu, Gly, His, Lys, Leu, Met, Asn, Pro, Arg, Ser, Thr or Tyr
  MOD_RES (4)...(4): Xaa = Ala, Asp, Glu, Gly, His, Lys, Leu, Met, Asn, Pro, Gln, Arg, Ser, Thr, Val or Trp
  MOD_RES (5)...(5): Xaa = Ala, Glu, Gly, Met, Asn, Pro, Gln, Arg, Ser, Thr or Tyr
  MOD_RES (7)...(7): Xaa = Ala, Asp, Glu, Phe, Gly, His, Ile, Lys, Leu, Met, Asn, Pro, Gln, Arg, Ser, Thr or Val
  MOD_RES (8)...(8): Xaa = Ala, Asp, Glu, Phe, Gly, His, Lys, Leu, Asn, Pro, Gln, Arg, Ser, Thr or Tyr
  MOD_RES (9)...(9): Xaa = Ala, Gly or Thr
  MOD_RES (10)...(10): Xaa = Ala, Asp, Glu, Phe, His, Ile, Lys, Leu, Met, Asn, Gln, Arg, Ser, Thr or Val
  MOD_RES (12)...(12): Xaa = Ala, Asp, Glu, Phe, Gly, His, Ile, Lys, Leu, Met, Asn, Gln, Arg, Ser, Thr, Val, Trp or Tyr
  MOD_RES (13)...(13): Xaa = Ala, Asp, Glu, Lys, Leu, Asn, Pro, Gln, Arg, Ser, Thr or Val
  MOD_RES (14)...(14): Xaa = Ala, Cys, Asp, Glu, Phe, Gly, His, Ile, Lys, Leu, Met, Asn, Pro, Gln, Arg, Ser, Thr, Val or Tyr
  MOD_RES (15)...(15): Xaa = Ala, Asp, Glu, Phe, Gly, His, Ile, Lys, Leu, Met, Asn, Pro, Gln, Arg, Ser, Thr, Val, Trp or Tyr
  MOD_RES (16)...(16): Xaa = Ala, Asp, Glu, Phe, Gly, His, Ile, Lys, Leu, Asn, Pro, Gln, Arg, Ser, Thr, Val or Trp
  MOD_RES (17)...(17): Xaa = Ala, Asp, Glu, Gly, His, Lys, Leu, Met, Asn, Gln, Arg, Ser, Thr, Val, Trp or Tyr
  MOD_RES (18)...(18): Xaa = Ala, Phe, His, Ile, Leu, Pro, Arg, Thr, Val or Tyr
  MOD_RES (19)...(19): Xaa = Ala, Asp, Glu, Phe, His, Ile, Lys, Leu, Met, Asn, Gln, Arg, Ser, Thr, Val, Trp or Tyr
  MOD_RES (21)...(21): Xaa = Ala, Asp, Glu, Phe, Gly, His, Ile, Lys, Leu, Met, Asn, Pro, Gln, Arg, Ser, Thr, Val, Trp or Tyr
  MOD_RES (23)...(23): Xaa = Ala, Asp, Glu, Phe, Gly, His, Ile, Lys, Leu, Asn, Pro, Gln, Arg, Ser, Thr, Val or Tyr
  MOD_RES (24)...(24): Xaa = Ala, Asp, Glu, Phe, His, Ile, Lys, Leu, Met, Asn, Pro, Gln, Arg, Ser, Thr or Val
  MOD_RES (25)...(25): Xaa = Asp, Glu, Gly, Asn, Pro or Ser
  MOD_RES (26)...(26): Xaa = Ala, Asp, Glu, Phe, His, Leu, Met, Gln, Arg, Ser, Thr, Trp or Tyr
  MOD_RES (27)...(27): Xaa = Ala, Asp, Glu, Phe, Gly, His, Ile, Lys, Leu, Met, Asn, Gln, Arg, Ser, Thr, Val or Tyr
  MOD_RES (28)...(28): Xaa = Ala, Phe, Gly, Ile, Lys, Leu, Met, Pro, Gln, Arg, Ser, Thr, Val, Trp or Tyr
  MOD_RES (29)...(29): Xaa = Ala, Asp, Glu, Phe, Gly, His, Lys, Leu, Met, Asn, Pro, Gln, Arg, Ser, Thr, Val or Trp
  MOD_RES (30)...(30): Xaa = Ala, Asp, Glu, Gly, Ile, Lys, Leu, Met, Asn, Pro, Gln, Arg, Ser, Thr, Val or Tyr
  MOD_RES (31)...(31): Xaa = Ala, Asp, Glu, Phe, Gly, His, Ile, Lys, Leu, Met, Asn, Gln, Ser, Thr or Val
  MOD_RES (32)...(32): Xaa = Glu, Phe, Gly, His, Ile, Lys, Leu, Met, Asn, Pro, Gln, Arg, Ser, Thr or Trp
  MOD_RES (33)...(33): Xaa = Ala, Asp, Glu, Phe, Gly, His, Lys, Leu, Met, Asn, Pro, Gln, Arg, Ser, Thr, Val or Tyr
  MOD_RES (34)...(34): Xaa = Ala, Asp, Glu, Phe, Gly, His, Ile, Lys, Met, Asn, Gln, Arg, Ser, Thr, Val or Tyr
CXXXXCXXXXCXXXXXXXXCXCXXXXXXXXXXXXC

SEQ ID NO: 254 - protein, 32 aa, Artificial Sequence
  EGF domain monomer sequence
  MOD_RES (2)...(2): Xaa = Ala, Asp, Glu, Phe, Gly, His, Ile, Lys, Leu, Asn, Pro, Gln, Arg, Ser, Thr, Val or Trp
  MOD_RES (3)...(3): Xaa = Ala, Asp, Glu, Gly, His, Lys, Leu, Met, Asn, Pro, Arg, Ser, Thr or Tyr
  MOD_RES (4)...(4): Xaa = Ala, Asp, Glu, Gly, His, Lys, Leu, Met, Asn, Pro, Gln, Arg, Ser, Thr, Val or Trp
  MOD_RES (5)...(5): Xaa = Ala, Glu, Gly, Met, Asn, Pro, Gln, Arg, Ser, Thr or Tyr
  MOD_RES (7)...(7): Xaa = Ala, Cys, Asp, Glu, Phe, Gly, His, Lys, Leu, Met, Asn, Pro, Gln, Arg, Ser, Val or Tyr
  MOD_RES (8)...(8): Xaa = Ala, Asp, Glu, Gly, His, Ile, Lys, Leu, Met, Asn, Pro, Gln, Arg, Ser, Thr, Val or Tyr
  MOD_RES (9)...(9): Xaa = Ala, Asp, Glu, Phe, Gly, His, Lys, Leu, Asn, Gln, Arg, Ser, Thr or Tyr
  MOD_RES (10)...(10): Xaa = Ala, Phe, Gly, His, Gln, Ser, Thr or Val
  MOD_RES (11)...(11): Xaa = Ala, Asp, Glu, Phe, His, Ile, Lys, Leu, Met, Asn, Gln, Arg, Ser, Thr or Val
  MOD_RES (13)...(13): Xaa = Ala, Asp, Glu, Phe, Gly, His, Ile, Lys, Leu, Met, Asn, Gln, Arg, Ser, Thr, Val, Trp or Tyr
  MOD_RES (14)...(14): Xaa = Ala, Asp, Glu, Lys, Leu, Asn, Pro, Gln, Arg, Ser, Thr or Val
  MOD_RES (15)...(15): Xaa = Ala, Cys, Asp, Glu, Phe, Gly, His, Ile, Lys, Leu, Met, Asn, Pro, Gln, Arg, Ser, Thr, Val or Tyr
  MOD_RES (16)...(16): Xaa = Ala, Asp, Glu, Phe, Gly, His, Ile, Lys, Leu, Met, Asn, Pro, Gln, Arg, Ser, Thr, Val, Trp or Tyr
  MOD_RES (17)...(17): Xaa = Ala, Asp, Glu, Phe, Gly, His, Ile, Lys, Leu, Asn, Pro, Gln, Arg, Ser, Thr, Val or Trp
  MOD_RES (18)...(18): Xaa = Ala, Asp, Glu, Gly, His, Lys, Leu, Met, Asn, Gln, Arg, Ser, Thr, Val, Trp or Tyr
  MOD_RES (19)...(19): Xaa = Ala, Phe, His, Ile, Leu, Pro, Arg, Thr, Val or Tyr
  MOD_RES (20)...(20): Xaa = Ala, Asp, Glu, Phe, His, Ile, Lys, Leu, Met, Asn, Gln, Arg, Ser, Thr, Val, Trp or Tyr
  MOD_RES (22)...(22): Xaa = Ala, Asp, Glu, Phe, Gly, His, Ile, Lys, Leu, Met, Asn, Pro, Gln, Arg, Ser, Thr, Val, Trp or Tyr
  MOD_RES (24)...(24): Xaa = Ala, Asp, Glu, Phe, His, Lys, Leu, Met, Asn, Pro, Gln, Arg, Ser, Thr, Val, Trp or Tyr
  MOD_RES (25)...(25): Xaa = Ala, Asp, Glu, Phe, Gly, His, Lys, Leu, Asn, Pro, Gln, Arg, Ser, Thr, Val or Tyr
  MOD_RES (26)...(26): Xaa = Ala, Glu, Gly, His, Lys, Leu, Asn, Pro, Arg, Ser, Thr or Tyr
  MOD_RES (27)...(27): Xaa = Phe, His, Ile, Leu, Met, Arg, Thr, Trp or Tyr
  MOD_RES (28)...(28): Xaa = Ala, Asp, Glu, Phe, Gly, His, Ile, Lys, Leu, Met, Asn, Gln, Arg, Ser, Thr, Val or Tyr
  MOD_RES (29)...(29): Xaa = Asp, Gly or Ser
  MOD_RES (30)...(30): Xaa = Ala, Asp, Glu, Phe, His, Ile, Lys, Leu, Asn, Pro, Gln, Arg, Ser, Thr, Val or Tyr
  MOD_RES (31)...(31): Xaa = Ala, Asp, Glu, Phe, His, Ile, Lys, Leu, Met, Asn, Gln, Arg, Ser, Thr or Tyr
CXXXXCXXXXXCXXXXXXXXCXCXXXXXXXXC

SEQ ID NO: 255 - protein, 33 aa, Artificial Sequence
  EGF domain monomer sequence
  MOD_RES (2)...(2): Xaa = Ala, Asp, Glu, Phe, Gly, His, Ile, Lys, Leu, Asn, Pro, Gln, Arg, Ser, Thr, Val or Trp
  MOD_RES (3)...(3): Xaa = Ala, Asp, Glu, Gly, His, Lys, Leu, Met, Asn, Pro, Arg, Ser, Thr or Tyr
  MOD_RES (4)...(4): Xaa = Ala, Asp, Glu, Gly, His, Lys, Leu, Met, Asn, Pro, Gln, Arg, Ser, Thr, Val or Trp
  MOD_RES (5)...(5): Xaa = Ala, Glu, Gly, Met, Asn, Pro, Gln, Arg, Ser, Thr or Tyr
  MOD_RES (7)...(7): Xaa = Ala, Cys, Asp, Glu, Phe, Gly, His, Lys, Leu, Met, Asn, Pro, Gln, Arg, Ser, Val or Tyr
  MOD_RES (8)...(8): Xaa = Ala, Asp, Glu, Gly, His, Ile, Lys, Leu, Met, Asn, Pro, Gln, Arg, Ser, Thr, Val or Tyr
  MOD_RES (9)...(9): Xaa = Ala, Asp, Glu, Phe, Gly, His, Lys, Leu, Asn, Gln, Arg, Ser, Thr or Tyr
  MOD_RES (10)...(10): Xaa = Ala, Phe, Gly, His, Gln, Ser, Thr or Val
  MOD_RES (11)...(11): Xaa = Ala, Asp, Glu, Phe, His, Ile, Lys, Leu, Met, Asn, Gln, Arg, Ser, Thr or Val
  MOD_RES (13)...(13): Xaa = Ala, Asp, Glu, Phe, Gly, His, Ile, Lys, Leu, Met, Asn, Gln, Arg, Ser, Thr, Val, Trp or Tyr
  MOD_RES (14)...(14): Xaa = Ala, Asp, Glu, Lys, Leu, Asn, Pro, Gln, Arg, Ser, Thr or Val
  MOD_RES (15)...(15): Xaa = Ala, Cys, Asp, Glu, Phe, Gly, His, Ile, Lys, Leu, Met, Asn, Pro, Gln, Arg, Ser, Thr, Val or Tyr
  MOD_RES (16)...(16): Xaa = Ala, Asp, Glu, Phe, Gly, His, Ile, Lys, Leu, Met, Asn, Pro, Gln, Arg, Ser, Thr, Val, Trp or Tyr
  MOD_RES (17)...(17): Xaa = Ala, Asp, Glu, Phe, Gly, His, Ile, Lys, Leu, Asn, Pro, Gln, Arg, Ser, Thr, Val or Trp
  MOD_RES (18)...(18): Xaa = Ala, Asp, Glu, Gly, His, Lys, Leu, Met, Asn, Gln, Arg, Ser, Thr, Val, Trp or Tyr
  MOD_RES (19)...(19): Xaa = Ala, Phe, His, Ile, Leu, Pro, Arg, Thr, Val or Tyr
  MOD_RES (20)...(20): Xaa = Ala, Asp, Glu, Phe, His, Ile, Lys, Leu, Met, Asn, Gln, Arg, Ser, Thr, Val, Trp or Tyr
  MOD_RES (22)...(22): Xaa = Ala, Asp, Glu, Phe, Gly, His, Ile, Lys, Leu, Met, Asn, Pro, Gln, Arg, Ser, Thr, Val, Trp or Tyr
  MOD_RES (24)...(24): Xaa = Ala, Asp, Glu, Phe, Gly, His, Ile, Lys, Leu, Asn, Pro, Gln, Arg, Ser, Thr, Val or Tyr
  MOD_RES (25)...(25): Xaa = Ala, Asp, Glu, Phe, His, Ile, Lys, Leu, Met, Asn, Pro, Gln, Arg, Ser, Thr or Val
  MOD_RES (26)...(26): Xaa = Asp, Glu, Gly, Asn, Pro or Ser
  MOD_RES (27)...(27): Xaa = Ala, Asp, Glu, Phe, His, Leu, Met, Gln, Arg, Ser, Thr, Trp or Tyr
  MOD_RES (28)...(28): Xaa = Ala, Asp, Glu, Phe, Gly, His, Ile, Lys, Leu, Met, Asn, Gln, Arg, Ser, Thr, Val or Tyr
  MOD_RES (29)...(29): Xaa = Ala, Phe, Gly, Ile, Lys, Leu, Met, Pro, Gln, Arg, Ser, Thr, Val, Trp or Tyr
  MOD_RES (30)...(30): Xaa = Ala, Asp, Glu, Phe, Gly, His, Lys, Leu, Met, Asn, Pro, Gln, Arg, Ser, Thr, Val or Trp
  MOD_RES (31)...(31): Xaa = Ala, Asp, Glu, Gly, Ile, Lys, Leu, Met, Asn, Pro, Gln, Arg, Ser, Thr, Val or Tyr
  MOD_RES (32)...(32): Xaa = Ala, Asp, Glu, Phe, Gly, His, Ile, Lys, Leu, Met, Asn, Gln, Ser, Thr or Val
CXXXXCXXXXXCXXXXXXXXCXCXXXXXXXXXC

SEQ ID NO: 256 - protein, 34 aa, Artificial Sequence
  EGF domain monomer sequence
  MOD_RES (2)...(2): Xaa = Ala, Asp, Glu, Phe, Gly, His, Ile, Lys, Leu, Asn, Pro, Gln, Arg, Ser, Thr, Val or Trp
  MOD_RES (3)...(3): Xaa = Ala, Asp, Glu, Gly, His, Lys, Leu, Met, Asn, Pro, Arg, Ser, Thr or Tyr
  MOD_RES (4)...(4): Xaa = Ala, Asp, Glu, Gly, His, Lys, Leu, Met, Asn, Pro, Gln, Arg, Ser, Thr, Val or Trp
  MOD_RES (5)...(5): Xaa = Ala, Glu, Gly, Met, Asn, Pro, Gln, Arg, Ser, Thr or Tyr
  MOD_RES (7)...(7): Xaa = Ala, Cys, Asp, Glu, Phe, Gly, His, Lys, Leu, Met, Asn, Pro, Gln, Arg, Ser, Val or Tyr
  MOD_RES (8)...(8): Xaa = Ala, Asp, Glu, Gly, His, Ile, Lys, Leu, Met, Asn, Pro, Gln, Arg, Ser, Thr, Val or Tyr
  MOD_RES (9)...(9): Xaa = Ala, Asp, Glu, Phe, Gly, His, Lys, Leu, Asn, Gln, Arg, Ser, Thr or Tyr
  MOD_RES (10)...(10): Xaa = Ala, Phe, Gly, His, Gln, Ser, Thr or Val
  MOD_RES (11)...(11): Xaa = Ala, Asp, Glu, Phe, His, Ile, Lys, Leu, Met, Asn, Gln, Arg, Ser, Thr or Val
  MOD_RES (13)...(13): Xaa = Ala, Asp, Glu, Phe, Gly, His, Ile, Lys, Leu, Met, Asn, Gln, Arg, Ser, Thr, Val, Trp or Tyr
  MOD_RES (14)...(14): Xaa = Ala, Asp, Glu, Lys, Leu, Asn, Pro, Gln, Arg, Ser, Thr or Val
  MOD_RES (15)...(15): Xaa = Ala, Cys, Asp, Glu, Phe, Gly, His, Ile, Lys, Leu, Met, Asn, Pro, Gln, Arg, Ser, Thr, Val or Tyr
  MOD_RES (16)...(16): Xaa = Ala, Asp, Glu, Phe, Gly, His, Ile, Lys, Leu, Met, Asn, Pro, Gln, Arg, Ser, Thr, Val, Trp or Tyr
  MOD_RES (17)...(17): Xaa = Ala, Asp, Glu, Phe, Gly, His, Ile, Lys, Leu, Asn, Pro, Gln, Arg, Ser, Thr, Val or Trp
  MOD_RES (18)...(18): Xaa = Ala, Asp, Glu, Gly, His, Lys, Leu, Met, Asn, Gln, Arg, Ser, Thr, Val, Trp or Tyr
  MOD_RES (19)...(19): Xaa = Ala, Phe, His, Ile, Leu, Pro, Arg, Thr, Val or Tyr
  MOD_RES (20)...(20): Xaa = Ala, Asp, Glu, Phe, His, Ile, Lys, Leu, Met, Asn, Gln, Arg, Ser, Thr, Val, Trp or Tyr
  MOD_RES (22)...(22): Xaa = Ala, Asp, Glu, Phe, Gly, His, Ile, Lys, Leu, Met, Asn, Pro, Gln, Arg, Ser, Thr, Val, Trp or Tyr
  MOD_RES (24)...(24): Xaa = Ala, Asp, Glu, Phe, Gly, His, Ile, Lys, Leu, Asn, Pro, Gln, Arg, Ser, Thr, Val or Tyr
  MOD_RES (25)...(25): Xaa = Ala, Asp, Glu, Phe, His, Ile, Lys, Leu, Met, Asn, Pro, Gln, Arg, Ser, Thr or Val
  MOD_RES (26)...(26): Xaa = Asp, Glu, Gly, Asn, Pro or Ser
  MOD_RES (27)...(27): Xaa = Ala, Asp, Glu, Phe, His, Leu, Met, Gln, Arg, Ser, Thr, Trp or Tyr
  MOD_RES (28)...(28): Xaa = Ala, Asp, Glu, Phe, Gly, His, Ile, Lys, Leu, Met, Asn, Gln, Arg, Ser, Thr, Val or Tyr
  MOD_RES (29)...(29): Xaa = Ala, Phe, Gly, Ile, Lys, Leu, Met, Pro, Gln, Arg, Ser, Thr, Val, Trp or Tyr
  MOD_RES (30)...(30): Xaa = Ala, Asp, Glu, Phe, Gly, His, Lys, Leu, Met, Asn, Pro, Gln, Arg, Ser, Thr, Val or Trp
  MOD_RES (31)...(31): Xaa = Ala, Asp, Glu, Gly, Ile, Lys, Leu, Met, Asn, Pro, Gln, Arg, Ser, Thr, Val or Tyr
  MOD_RES (32)...(32): Xaa = Ala, Asp, Glu, Phe, Gly, His, Ile, Lys, Leu, Met, Asn, Gln, Ser, Thr or Val
  MOD_RES (33)...(33): Xaa = Glu, Phe, Gly, His, Ile, Lys, Leu, Met, Asn, Pro, Gln, Arg, Ser, Thr or Trp
CXXXXCXXXXXCXXXXXXXXCXCXXXXXXXXXXC

SEQ ID NO: 257 - protein, 35 aa, Artificial Sequence
  EGF domain monomer sequence
  MOD_RES (2)...(2): Xaa = Ala, Asp, Glu, Phe, Gly, His, Ile, Lys, Leu, Asn, Pro, Gln, Arg, Ser, Thr, Val or Trp
  MOD_RES (3)...(3): Xaa = Ala, Asp, Glu, Gly, His, Lys, Leu, Met, Asn, Pro, Arg, Ser, Thr or Tyr
  MOD_RES (4)...(4): Xaa = Ala, Asp, Glu, Gly, His, Lys, Leu, Met, Asn, Pro, Gln, Arg, Ser, Thr, Val or Trp
  MOD_RES (5)...(5): Xaa = Ala, Glu, Gly, Met, Asn, Pro, Gln, Arg, Ser, Thr or Tyr
  MOD_RES (7)...(7): Xaa = Ala, Cys, Asp, Glu, Phe, Gly, His, Lys, Leu, Met, Asn, Pro, Gln, Arg, Ser, Val or Tyr
  MOD_RES (8)...(8): Xaa = Ala, Asp, Glu, Gly, His, Ile, Lys, Leu, Met, Asn, Pro, Gln, Arg, Ser, Thr, Val or Tyr
  MOD_RES (9)...(9): Xaa = Ala, Asp, Glu, Phe, Gly, His, Lys, Leu, Asn, Gln, Arg, Ser, Thr or Tyr
  MOD_RES (10)...(10): Xaa = Ala, Phe, Gly, His, Gln, Ser, Thr or Val
  MOD_RES (11)...(11): Xaa = Ala, Asp, Glu, Phe, His, Ile, Lys, Leu, Met, Asn, Gln, Arg, Ser, Thr or Val
  MOD_RES (13)...(13): Xaa = Ala, Asp, Glu, Phe, Gly, His, Ile, Lys, Leu, Met, Asn, Gln, Arg, Ser, Thr, Val, Trp or Tyr
  MOD_RES (14)...(14): Xaa = Ala, Asp, Glu, Lys, Leu, Asn, Pro, Gln, Arg, Ser, Thr or Val
  MOD_RES (15)...(15): Xaa = Ala, Cys, Asp, Glu, Phe, Gly, His, Ile, Lys, Leu, Met, Asn, Pro, Gln, Arg, Ser, Thr, Val or Tyr
  MOD_RES (16)...(16): Xaa = Ala, Asp, Glu, Phe, Gly, His, Ile, Lys, Leu, Met, Asn, Pro, Gln, Arg, Ser, Thr, Val, Trp or Tyr
  MOD_RES (17)...(17): Xaa = Ala, Asp, Glu, Phe, Gly, His, Ile, Lys, Leu, Asn, Pro, Gln, Arg, Ser, Thr, Val or Trp
  MOD_RES (18)...(18): Xaa = Ala, Asp, Glu, Gly, His, Lys, Leu, Met, Asn, Gln, Arg, Ser, Thr, Val, Trp or Tyr
  MOD_RES (19)...(19): Xaa = Ala, Phe, His, Ile, Leu, Pro, Arg, Thr, Val or Tyr
  MOD_RES (20)...(20): Xaa = Ala, Asp, Glu, Phe, His, Ile, Lys, Leu, Met, Asn, Gln, Arg, Ser, Thr, Val, Trp or Tyr
  MOD_RES (22)...(22): Xaa = Ala, Asp, Glu, Phe, Gly, His, Ile, Lys, Leu, Met, Asn, Pro, Gln, Arg, Ser, Thr, Val, Trp or Tyr
  MOD_RES (24)...(24): Xaa = Ala, Asp, Glu, Phe, Gly, His, Ile, Lys, Leu, Asn, Pro, Gln, Arg, Ser, Thr, Val or Tyr
  MOD_RES (25)...(25): Xaa = Ala, Asp, Glu, Phe, His, Ile, Lys, Leu, Met, Asn, Pro, Gln, Arg, Ser, Thr or Val
  MOD_RES (26)...(26): Xaa = Asp, Glu, Gly, Asn, Pro or Ser
  MOD_RES (27)...(27): Xaa = Ala, Asp, Glu, Phe, His, Leu, Met, Gln, Arg, Ser, Thr, Trp or Tyr
  MOD_RES (28)...(28): Xaa = Ala, Asp, Glu, Phe, Gly, His, Ile, Lys, Leu, Met, Asn, Gln, Arg, Ser, Thr, Val or Tyr
  MOD_RES (29)...(29): Xaa = Ala, Phe, Gly, Ile, Lys, Leu, Met, Pro, Gln, Arg, Ser, Thr, Val, Trp or Tyr
  MOD_RES (30)...(30): Xaa = Ala, Asp, Glu, Phe, Gly, His, Lys, Leu, Met, Asn, Pro, Gln, Arg, Ser, Thr, Val or Trp
  MOD_RES (31)...(31): Xaa = Ala, Asp, Glu, Gly, Ile, Lys, Leu, Met, Asn, Pro, Gln, Arg, Ser, Thr, Val or Tyr
  MOD_RES (32)...(32): Xaa = Ala, Asp, Glu, Phe, Gly, His, Ile, Lys, Leu, Met, Asn, Gln, Ser, Thr or Val
  MOD_RES (33)...(33): Xaa = Glu, Phe, Gly, His, Ile, Lys, Leu, Met, Asn, Pro, Gln, Arg, Ser, Thr or Trp
  MOD_RES (34)...(34): Xaa = Ala, Asp, Glu, Phe, Gly, His, Lys, Leu, Met, Asn, Pro, Gln, Arg, Ser, Thr, Val or Tyr
CXXXXCXXXXXCXXXXXXXXCXCXXXXXXXXXXXC

SEQ ID NO: 258 - protein, 36 aa, Artificial Sequence
  EGF domain monomer sequence
  MOD_RES (2)...(2): Xaa = Ala, Asp, Glu, Phe, Gly, His, Ile, Lys, Leu, Asn, Pro, Gln, Arg, Ser, Thr, Val or Trp
  MOD_RES (3)...(3): Xaa = Ala, Asp, Glu, Gly, His, Lys, Leu, Met, Asn, Pro, Arg, Ser, Thr or Tyr
  MOD_RES (4)...(4): Xaa = Ala, Asp, Glu, Gly, His, Lys, Leu, Met, Asn, Pro, Gln, Arg, Ser, Thr, Val or Trp
  MOD_RES (5)...(5): Xaa = Ala, Glu, Gly, Met, Asn, Pro, Gln, Arg, Ser, Thr or Tyr
  MOD_RES (7)...(7): Xaa = Ala, Cys, Asp, Glu, Phe, Gly, His, Lys, Leu, Met, Asn, Pro, Gln, Arg, Ser, Val or Tyr
  MOD_RES (8)...(8): Xaa = Ala, Asp, Glu, Gly, His, Ile, Lys, Leu, Met, Asn, Pro, Gln, Arg, Ser, Thr, Val or Tyr
  MOD_RES (9)...(9): Xaa = Ala, Asp, Glu, Phe, Gly, His, Lys, Leu, Asn, Gln, Arg, Ser, Thr or Tyr
  MOD_RES (10)...(10): Xaa = Ala, Phe, Gly, His, Gln, Ser, Thr or Val
  MOD_RES (11)...(11): Xaa = Ala, Asp, Glu, Phe, His, Ile, Lys, Leu, Met, Asn, Gln, Arg, Ser, Thr or Val
  MOD_RES (13)...(13): Xaa = Ala, Asp, Glu, Phe, Gly, His, Ile, Lys, Leu, Met, Asn, Gln, Arg, Ser, Thr, Val, Trp or Tyr
  MOD_RES (14)...(14): Xaa = Ala, Asp, Glu, Lys, Leu, Asn, Pro, Gln, Arg, Ser, Thr or Val
  MOD_RES (15)...(15): Xaa = Ala, Cys, Asp, Glu, Phe, Gly, His, Ile, Lys, Leu, Met, Asn, Pro, Gln, Arg, Ser, Thr, Val or Tyr
  MOD_RES (16)...(16): Xaa = Ala, Asp, Glu, Phe, Gly, His, Ile, Lys, Leu, Met, Asn, Pro, Gln, Arg, Ser, Thr, Val, Trp or Tyr
  MOD_RES (17)...(17): Xaa = Ala, Asp, Glu, Phe, Gly, His, Ile, Lys, Leu, Asn, Pro, Gln, Arg, Ser, Thr, Val or Trp
  MOD_RES (18)...(18): Xaa = Ala, Asp, Glu, Gly, His, Lys, Leu, Met, Asn, Gln, Arg, Ser, Thr, Val, Trp or Tyr
  MOD_RES (19)...(19): Xaa = Ala, Phe, His, Ile, Leu, Pro, Arg, Thr, Val or Tyr
  MOD_RES (20)...(20): Xaa = Ala, Asp, Glu, Phe, His, Ile, Lys, Leu, Met, Asn, Gln, Arg, Ser, Thr, Val, Trp or Tyr
  MOD_RES (22)...(22): Xaa = Ala, Asp, Glu, Phe, Gly, His, Ile, Lys, Leu, Met, Asn, Pro, Gln, Arg, Ser, Thr, Val, Trp or Tyr
  MOD_RES (24)...(24): Xaa = Ala, Asp, Glu, Phe, Gly, His, Ile, Lys, Leu, Asn, Pro, Gln, Arg, Ser, Thr, Val or Tyr
  MOD_RES (25)...(25): Xaa = Ala, Asp, Glu, Phe, His, Ile, Lys, Leu, Met, Asn, Pro, Gln, Arg, Ser, Thr or Val
  MOD_RES (26)...(26): Xaa = Asp, Glu, Gly, Asn, Pro or Ser
  MOD_RES (27)...(27): Xaa = Ala, Asp, Glu, Phe, His, Leu, Met, Gln, Arg, Ser, Thr, Trp or Tyr
  MOD_RES (28)...(28): Xaa = Ala, Asp, Glu, Phe, Gly, His, Ile, Lys, Leu, Met, Asn, Gln, Arg, Ser, Thr, Val or Tyr
  MOD_RES (29)...(29): Xaa = Ala, Phe, Gly, Ile, Lys, Leu, Met, Pro, Gln, Arg, Ser, Thr, Val, Trp or Tyr
  MOD_RES (30)...(30): Xaa = Ala, Asp, Glu, Phe, Gly, His, Lys, Leu, Met, Asn, Pro, Gln, Arg, Ser, Thr, Val or Trp
  MOD_RES (31)...(31): Xaa = Ala, Asp, Glu, Gly, Ile, Lys, Leu, Met, Asn, Pro, Gln, Arg, Ser, Thr, Val or Tyr
  MOD_RES (32)...(32): Xaa = Ala, Asp, Glu, Phe, Gly, His, Ile, Lys, Leu, Met, Asn, Gln, Ser, Thr or Val
  MOD_RES (33)...(33): Xaa = Glu, Phe, Gly, His, Ile, Lys, Leu, Met, Asn, Pro, Gln, Arg, Ser, Thr or Trp
  MOD_RES (34)...(34): Xaa = Ala, Asp, Glu, Phe, Gly, His, Lys, Leu, Met, Asn, Pro, Gln, Arg, Ser, Thr, Val or Tyr
  MOD_RES (35)...(35): Xaa = Ala, Asp, Glu, Phe, Gly, His, Ile, Lys, Met, Asn, Gln, Arg, Ser, Thr, Val or Tyr
CXXXXCXXXXXCXXXXXXXXCXCXXXXXXXXXXXXC

SEQ ID NO: 259 - protein, 31 aa, Artificial Sequence
  EGF domain monomer sequence
  MOD_RES (2)...(2): Xaa = Ala, Asp, Glu, Phe, Gly, His, Ile, Lys, Leu, Asn, Pro, Gln, Arg, Ser, Thr, Val or Trp
  MOD_RES (3)...(3): Xaa = Ala, Asp, Glu, Gly, His, Lys, Leu, Met, Asn, Pro, Arg, Ser, Thr or Tyr
  MOD_RES (4)...(4): Xaa = Ala, Asp, Glu, Gly, His, Lys, Leu, Met, Asn, Pro, Gln, Arg, Ser, Thr, Val or Trp
  MOD_RES (5)...(5): Xaa = Ala, Glu, Gly, Met, Asn, Pro, Gln, Arg, Ser, Thr or Tyr
  MOD_RES (7)...(7): Xaa = Ala, Asp, Glu, Gly, His, Lys, Asn, Pro, Gln, Ser, Thr or Val
  MOD_RES (8)...(8): Xaa = Phe, Gly, His, Leu, Asn, Gln, Ser, Thr or Tyr
  MOD_RES (9)...(9): Xaa = Ala, Asp, Glu, Phe, Gly, His, Ile, Lys, Leu, Asn, Gln, Arg, Ser, Thr, Val or Tyr
  MOD_RES (11)...(11): Xaa = Ala, Asp, Phe, His, Ile, Lys, Leu, Met, Asn, Gln, Arg, Ser, Thr, Val or Tyr
  MOD_RES (12)...(12): Xaa = Ala, Asp, Glu, Phe, His, Leu, Met, Asn, Pro, Gln, Arg, Ser, Val or Tyr
  MOD_RES (13)...(13): Xaa = Ala, Asp, Glu, Phe, Gly, His, Leu, Asn, Arg, Ser, Thr, Val or Tyr
  MOD_RES (14)...(14): Xaa = Ala, Asp, Glu, Gly, Asn, Pro, Gln, Arg, Ser or Thr
  MOD_RES (15)...(15): Xaa = Ala, Asp, Glu, Phe, Gly, Lys, Leu, Asn, Pro, Gln, Arg, Ser or Thr
  MOD_RES (16)...(16): Xaa = Ala, Asp, Glu, Gly, Met, Asn, Arg, Ser, Thr, Val or Tyr
  MOD_RES (17)...(17): Xaa = Ala, Asp, Glu, Gly, Lys, Leu, Met, Gln, Arg, Ser or Thr
  MOD_RES (18)...(18): Xaa = Phe, His, Ile, Pro, Arg, Val, Trp or Tyr
  MOD_RES (19)...(19): Xaa = Ala, Glu, His, Lys, Leu, Gln, Ser, Thr, Val or Tyr
  MOD_RES (21)...(21): Xaa = Ala, Asp, Glu, Phe, Gly, His, Ile, Lys, Leu, Met, Asn, Pro, Gln, Arg, Ser, Thr, Val, Trp or Tyr
  MOD_RES (23)...(23): Xaa = Ala, Asp, Glu, Phe, His, Lys, Leu, Met, Asn, Pro, Gln, Arg, Ser, Thr, Val, Trp or Tyr
  MOD_RES (24)...(24): Xaa = Ala, Asp, Glu, Phe, Gly, His, Lys, Leu, Asn, Pro, Gln, Arg, Ser, Thr, Val or Tyr
  MOD_RES (25)...(25): Xaa = Ala, Glu, Gly, His, Lys, Leu, Asn, Pro, Arg, Ser, Thr or Tyr
  MOD_RES (26)...(26): Xaa = Phe, His, Ile, Leu, Met, Arg, Thr, Trp or Tyr
  MOD_RES (27)...(27): Xaa = Ala, Asp, Glu, Phe, Gly, His, Ile, Lys, Leu, Met, Asn, Gln, Arg, Ser, Thr, Val or Tyr
  MOD_RES (28)...(28): Xaa = Asp, Gly or Ser
  MOD_RES (29)...(29): Xaa = Ala, Asp, Glu, Phe, His, Ile, Lys, Leu, Asn, Pro, Gln, Arg, Ser, Thr, Val or Tyr
  MOD_RES (30)...(30): Xaa = Ala, Asp, Glu, Phe, His, Ile, Lys, Leu, Met, Asn, Gln, Arg, Ser, Thr or Tyr
CXXXXCXXXCXXXXXXXXXCXCXXXXXXXXC

SEQ ID NO: 260 - protein, 32 aa, Artificial Sequence
  EGF domain monomer sequence
  MOD_RES (2)...(2): Xaa = Ala, Asp, Glu, Phe, Gly, His, Ile, Lys, Leu, Asn, Pro, Gln, Arg, Ser, Thr, Val or Trp
  MOD_RES (3)...(3): Xaa = Ala, Asp, Glu, Gly, His, Lys, Leu, Met, Asn, Pro, Arg, Ser, Thr or Tyr
  MOD_RES (4)...(4): Xaa = Ala, Asp, Glu, Gly, His, Lys, Leu, Met, Asn, Pro, Gln, Arg, Ser, Thr, Val or Trp
  MOD_RES (5)...(5): Xaa = Ala, Glu, Gly, Met, Asn, Pro, Gln, Arg, Ser, Thr or Tyr
  MOD_RES (7)...(7): Xaa = Ala, Asp, Glu, Gly, His, Lys, Asn, Pro, Gln, Ser, Thr or Val
  MOD_RES (8)...(8): Xaa = Phe, Gly, His, Leu, Asn, Gln, Ser, Thr or Tyr
  MOD_RES (9)...(9): Xaa = Ala, Asp, Glu, Phe, Gly, His, Ile, Lys, Leu, Asn, Gln, Arg, Ser, Thr, Val or Tyr
  MOD_RES (11)...(11): Xaa = Ala, Asp, Phe, His, Ile, Lys, Leu, Met, Asn, Gln, Arg, Ser, Thr, Val or Tyr
  MOD_RES (12)...(12): Xaa = Ala, Asp, Glu, Phe, His, Leu, Met, Asn, Pro, Gln, Arg, Ser, Val or Tyr
  MOD_RES (13)...(13): Xaa = Ala, Asp, Glu, Phe, Gly, His, Leu, Asn, Arg, Ser, Thr, Val or Tyr
  MOD_RES (14)...(14): Xaa = Ala, Asp, Glu, Gly, Asn, Pro, Gln, Arg, Ser or Thr
  MOD_RES (15)...(15): Xaa = Ala, Asp, Glu, Phe, Gly, Lys, Leu, Asn, Pro, Gln, Arg, Ser or Thr
  MOD_RES (16)...(16): Xaa = Ala, Asp, Glu, Gly, Met, Asn, Arg, Ser, Thr, Val or Tyr
  MOD_RES (17)...(17): Xaa = Ala, Asp, Glu, Gly, Lys, Leu, Met, Gln, Arg, Ser or Thr
  MOD_RES (18)...(18): Xaa = Phe, His, Ile, Pro, Arg, Val, Trp or Tyr
  MOD_RES (19)...(19): Xaa = Ala, Glu, His, Lys, Leu, Gln, Ser, Thr, Val or Tyr
  MOD_RES (21)...(21): Xaa = Ala, Asp, Glu, Phe, Gly, His, Ile, Lys, Leu, Met, Asn, Pro, Gln, Arg, Ser, Thr, Val, Trp or Tyr
  MOD_RES (23)...(23): Xaa = Ala, Asp, Glu, Phe, Gly, His, Ile, Lys, Leu, Asn, Pro, Gln, Arg, Ser, Thr, Val or Tyr
  MOD_RES (24)...(24): Xaa = Ala, Asp, Glu, Phe, His, Ile, Lys, Leu, Met, Asn, Pro, Gln, Arg, Ser, Thr or Val
  MOD_RES (25)...(25): Xaa = Asp, Glu, Gly, Asn, Pro or Ser
  MOD_RES (26)...(26): Xaa = Ala, Asp, Glu, Phe, His, Leu, Met, Gln, Arg, Ser, Thr, Trp or Tyr
  MOD_RES (27)...(27): Xaa = Ala, Asp, Glu, Phe, Gly, His, Ile, Lys, Leu, Met, Asn, Gln, Arg, Ser, Thr, Val or Tyr
  MOD_RES (28)...(28): Xaa = Ala, Phe, Gly, Ile, Lys, Leu, Met, Pro, Gln, Arg, Ser, Thr, Val, Trp or Tyr
  MOD_RES (29)...(29): Xaa = Ala, Asp, Glu, Phe, Gly, His, Lys, Leu, Met, Asn, Pro, Gln, Arg, Ser, Thr, Val or Trp
  MOD_RES (30)...(30): Xaa = Ala, Asp, Glu, Gly, Ile, Lys, Leu, Met, Asn, Pro, Gln, Arg, Ser, Thr, Val or Tyr
  MOD_RES (31)...(31): Xaa = Ala, Asp, Glu, Phe, Gly, His, Ile, Lys, Leu, Met, Asn, Gln, Ser, Thr or Val
CXXXXCXXXCXXXXXXXXXCXCXXXXXXXXXC

SEQ ID NO: 261 - protein, 33 aa, Artificial Sequence
  EGF domain monomer sequence
  MOD_RES (2)...(2): Xaa = Ala, Asp, Glu, Phe, Gly, His, Ile, Lys, Leu, Asn, Pro, Gln, Arg, Ser, Thr, Val or Trp
  MOD_RES (3)...(3): Xaa = Ala, Asp, Glu, Gly, His, Lys, Leu, Met, Asn, Pro, Arg, Ser, Thr or Tyr
  MOD_RES (4)...(4): Xaa = Ala, Asp, Glu, Gly, His, Lys, Leu, Met, Asn, Pro, Gln, Arg, Ser, Thr, Val or Trp
  MOD_RES (5)...(5): Xaa = Ala, Glu, Gly, Met, Asn, Pro, Gln, Arg, Ser, Thr or Tyr
  MOD_RES (7)...(7): Xaa = Ala, Asp, Glu, Gly, His, Lys, Asn, Pro, Gln, Ser, Thr or Val
  MOD_RES (8)...(8): Xaa = Phe, Gly, His, Leu, Asn, Gln, Ser, Thr or Tyr
  MOD_RES (9)...(9): Xaa = Ala, Asp, Glu, Phe, Gly, His, Ile, Lys, Leu, Asn, Gln, Arg, Ser, Thr, Val or Tyr
  MOD_RES (11)...(11): Xaa = Ala, Asp, Phe, His, Ile, Lys, Leu, Met, Asn, Gln, Arg, Ser, Thr, Val or Tyr
  MOD_RES (12)...(12): Xaa = Ala, Asp, Glu, Phe, His, Leu, Met, Asn, Pro, Gln, Arg, Ser, Val or Tyr
  MOD_RES (13)...(13): Xaa = Ala, Asp, Glu, Phe, Gly, His, Leu, Asn, Arg, Ser, Thr, Val or Tyr
  MOD_RES (14)...(14): Xaa = Ala, Asp, Glu, Gly, Asn, Pro, Gln, Arg, Ser or Thr
  MOD_RES (15)...(15): Xaa = Ala, Asp, Glu, Phe, Gly, Lys, Leu, Asn, Pro, Gln, Arg, Ser or Thr
  MOD_RES (16)...(16): Xaa = Ala, Asp, Glu, Gly, Met, Asn, Arg, Ser, Thr, Val or Tyr
  MOD_RES (17)...(17): Xaa = Ala, Asp, Glu, Gly, Lys, Leu, Met, Gln, Arg, Ser or Thr
  MOD_RES (18)...(18): Xaa = Phe, His, Ile, Pro, Arg, Val, Trp or Tyr
  MOD_RES (19)...(19): Xaa = Ala, Glu, His, Lys, Leu, Gln, Ser, Thr, Val or Tyr
  MOD_RES (21)...(21): Xaa = Ala, Asp, Glu, Phe, Gly, His, Ile, Lys, Leu, Met, Asn, Pro, Gln, Arg, Ser, Thr, Val, Trp or Tyr
  MOD_RES (23)...(23): Xaa = Ala, Asp, Glu, Phe, Gly, His, Ile, Lys, Leu, Asn, Pro, Gln, Arg, Ser, Thr, Val or Tyr
  MOD_RES (24)...(24): Xaa = Ala, Asp, Glu, Phe, His, Ile, Lys, Leu, Met, Asn, Pro, Gln, Arg, Ser, Thr or Val
  MOD_RES (25)...(25): Xaa = Asp, Glu, Gly, Asn, Pro or Ser
  MOD_RES (26)...(26): Xaa = Ala, Asp, Glu, Phe, His, Leu, Met, Gln, Arg, Ser, Thr, Trp or Tyr
  MOD_RES (27)...(27): Xaa = Ala, Asp, Glu, Phe, Gly, His, Ile, Lys, Leu, Met, Asn, Gln, Arg, Ser, Thr, Val or Tyr
  MOD_RES (28)...(28): Xaa = Ala, Phe, Gly, Ile, Lys, Leu, Met, Pro, Gln, Arg, Ser, Thr, Val, Trp or Tyr
  MOD_RES (29)...(29): Xaa = Ala, Asp, Glu, Phe, Gly, His, Lys, Leu, Met, Asn, Pro, Gln, Arg, Ser, Thr, Val or Trp
  MOD_RES (30)...(30): Xaa = Ala, Asp, Glu, Gly, Ile, Lys, Leu, Met, Asn, Pro, Gln, Arg, Ser, Thr, Val or Tyr
  MOD_RES (31)...(31): Xaa = Ala, Asp, Glu, Phe, Gly, His, Ile, Lys, Leu, Met, Asn, Gln, Ser, Thr or Val
  MOD_RES (32)...(32): Xaa = Glu, Phe, Gly, His, Ile, Lys, Leu, Met, Asn, Pro, Gln, Arg, Ser, Thr or Trp
CXXXXCXXXCXXXXXXXXXCXCXXXXXXXXXXC

SEQ ID NO: 262 - protein, 34 aa, Artificial Sequence
  EGF domain monomer sequence
  MOD_RES (2)...(2): Xaa = Ala, Asp, Glu, Phe, Gly, His, Ile, Lys, Leu, Asn, Pro, Gln, Arg, Ser, Thr, Val or Trp
  MOD_RES (3)...(3): Xaa = Ala, Asp, Glu, Gly, His, Lys, Leu, Met, Asn, Pro, Arg, Ser, Thr or Tyr
  MOD_RES (4)...(4): Xaa = Ala, Asp, Glu, Gly, His, Lys, Leu, Met, Asn, Pro, Gln, Arg, Ser, Thr, Val or Trp
  MOD_RES (5)...(5): Xaa = Ala, Glu, Gly, Met, Asn, Pro, Gln, Arg, Ser, Thr or Tyr
  MOD_RES (7)...(7): Xaa = Ala, Asp, Glu, Gly, His, Lys, Asn, Pro, Gln, Ser, Thr or Val
  MOD_RES (8)...(8): Xaa = Phe, Gly, His, Leu, Asn, Gln, Ser, Thr or Tyr
  MOD_RES (9)...(9): Xaa = Ala, Asp, Glu, Phe, Gly, His, Ile, Lys, Leu, Asn, Gln, Arg, Ser, Thr, Val or Tyr
  MOD_RES (11)...(11): Xaa = Ala, Asp, Phe, His, Ile, Lys, Leu, Met, Asn, Gln, Arg, Ser, Thr, Val or Tyr
  MOD_RES (12)...(12): Xaa = Ala, Asp, Glu, Phe, His, Leu, Met, Asn, Pro, Gln, Arg, Ser, Val or Tyr
  MOD_RES (13)...(13): Xaa = Ala, Asp, Glu, Phe, Gly, His, Leu, Asn, Arg, Ser, Thr, Val or Tyr
  MOD_RES (14)...(14): Xaa = Ala, Asp, Glu, Gly, Asn, Pro, Gln, Arg, Ser or Thr
  MOD_RES (15)...(15): Xaa = Ala, Asp, Glu, Phe, Gly, Lys, Leu, Asn, Pro, Gln, Arg, Ser or Thr
  MOD_RES (16)...(16): Xaa = Ala, Asp, Glu, Gly, Met, Asn, Arg, Ser, Thr, Val or Tyr
  MOD_RES (17)...(17): Xaa = Ala, Asp, Glu, Gly, Lys, Leu, Met, Gln, Arg, Ser or Thr
  MOD_RES (18)...(18): Xaa = Phe, His, Ile, Pro, Arg, Val, Trp or Tyr
  MOD_RES (19)...(19): Xaa = Ala, Glu, His, Lys, Leu, Gln, Ser, Thr, Val or Tyr
  MOD_RES (21)...(21): Xaa = Ala, Asp, Glu, Phe, Gly, His, Ile, Lys, Leu, Met, Asn, Pro, Gln, Arg, Ser, Thr, Val, Trp or Tyr
  MOD_RES (23)...(23): Xaa = Ala, Asp, Glu, Phe, Gly, His, Ile, Lys, Leu, Asn, Pro, Gln, Arg, Ser, Thr, Val or Tyr
  MOD_RES (24)...(24): Xaa = Ala, Asp, Glu, Phe, His, Ile, Lys, Leu, Met, Asn, Pro, Gln, Arg, Ser, Thr or Val
  MOD_RES (25)...(25): Xaa = Asp, Glu, Gly, Asn, Pro or Ser
  MOD_RES (26)...(26): Xaa = Ala, Asp, Glu, Phe, His, Leu, Met, Gln, Arg, Ser, Thr, Trp or Tyr
  MOD_RES (27)...(27): Xaa = Ala, Asp, Glu, Phe, Gly, His, Ile, Lys, Leu, Met, Asn, Gln, Arg, Ser, Thr, Val or Tyr
  MOD_RES (28)...(28): Xaa = Ala, Phe, Gly, Ile, Lys, Leu, Met, Pro, Gln, Arg, Ser, Thr, Val, Trp or Tyr
  MOD_RES (29)...(29): Xaa = Ala, Asp, Glu, Phe, Gly, His, Lys, Leu, Met, Asn, Pro, Gln, Arg, Ser, Thr, Val or Trp
  MOD_RES (30)...(30): Xaa = Ala, Asp, Glu, Gly, Ile, Lys, Leu, Met, Asn, Pro, Gln, Arg, Ser, Thr, Val or Tyr
  MOD_RES (31)...(31): Xaa = Ala, Asp, Glu, Phe, Gly, His, Ile, Lys, Leu, Met, Asn, Gln, Ser, Thr or Val
  MOD_RES (32)...(32): Xaa = Glu, Phe, Gly, His, Ile, Lys, Leu, Met, Asn, Pro, Gln, Arg, Ser, Thr or Trp
  MOD_RES (33)...(33): Xaa = Ala, Asp, Glu, Phe, Gly, His, Lys, Leu, Met, Asn, Pro, Gln, Arg, Ser, Thr, Val or Tyr
CXXXXCXXXCXXXXXXXXXCXCXXXXXXXXXXXC

SEQ ID NO: 263 - protein, 35 aa, Artificial Sequence
  EGF domain monomer sequence
  MOD_RES (2)...(2): Xaa = Ala, Asp, Glu, Phe, Gly, His, Ile, Lys, Leu, Asn, Pro, Gln, Arg, Ser, Thr, Val or Trp
  MOD_RES (3)...(3): Xaa = Ala, Asp, Glu, Gly, His, Lys, Leu, Met, Asn, Pro, Arg, Ser, Thr or Tyr
  MOD_RES (4)...(4): Xaa = Ala, Asp, Glu, Gly, His, Lys, Leu, Met, Asn, Pro, Gln, Arg, Ser, Thr, Val or Trp
  MOD_RES (5)...(5): Xaa = Ala, Glu, Gly, Met, Asn, Pro, Gln, Arg, Ser, Thr or Tyr
  MOD_RES (7)...(7): Xaa = Ala, Asp, Glu, Gly, His, Lys, Asn, Pro, Gln, Ser, Thr or Val
  MOD_RES (8)...(8): Xaa = Phe, Gly, His, Leu, Asn, Gln, Ser, Thr or Tyr
  MOD_RES (9)...(9): Xaa = Ala, Asp, Glu, Phe, Gly, His, Ile, Lys, Leu, Asn, Gln, Arg, Ser, Thr, Val or Tyr
  MOD_RES (11)...(11): Xaa = Ala, Asp, Phe, His, Ile, Lys, Leu, Met, Asn, Gln, Arg, Ser, Thr, Val or Tyr
  MOD_RES (12)...(12): Xaa = Ala, Asp, Glu, Phe, His, Leu, Met, Asn, Pro, Gln, Arg, Ser, Val or Tyr
  MOD_RES (13)...(13): Xaa = Ala, Asp, Glu, Phe, Gly, His, Leu, Asn, Arg, Ser, Thr, Val or Tyr
  MOD_RES (14)...(14): Xaa = Ala, Asp, Glu, Gly, Asn, Pro, Gln, Arg, Ser or Thr
  MOD_RES (15)...(15): Xaa = Ala, Asp, Glu, Phe, Gly, Lys, Leu, Asn, Pro, Gln, Arg, Ser or Thr
  MOD_RES (16)...(16): Xaa = Ala, Asp, Glu, Gly, Met, Asn, Arg, Ser, Thr, Val or Tyr
  MOD_RES (17)...(17): Xaa = Ala, Asp, Glu, Gly, Lys, Leu, Met, Gln, Arg, Ser or Thr
  MOD_RES (18)...(18): Xaa = Phe, His, Ile, Pro, Arg, Val, Trp or Tyr
  MOD_RES (19)...(19): Xaa = Ala, Glu, His, Lys, Leu, Gln, Ser, Thr, Val or Tyr
  MOD_RES (21)...(21): Xaa = Ala, Asp, Glu, Phe, Gly, His, Ile, Lys, Leu, Met, Asn, Pro, Gln, Arg, Ser, Thr, Val, Trp or Tyr
  MOD_RES (23)...(23): Xaa = Ala, Asp, Glu, Phe, Gly, His, Ile, Lys, Leu, Asn, Pro, Gln, Arg, Ser, Thr, Val or Tyr
  MOD_RES (24)...(24): Xaa = Ala, Asp, Glu, Phe, His, Ile, Lys, Leu, Met, Asn, Pro, Gln, Arg, Ser, Thr or Val
  MOD_RES (25)...(25): Xaa = Asp, Glu, Gly, Asn, Pro or Ser
  MOD_RES (26)...(26): Xaa = Ala, Asp, Glu, Phe, His, Leu, Met, Gln, Arg, Ser, Thr, Trp or Tyr
  MOD_RES (27)...(27): Xaa = Ala, Asp, Glu, Phe, Gly, His, Ile, Lys, Leu, Met, Asn, Gln, Arg, Ser, Thr, Val or Tyr
  MOD_RES (28)...(28): Xaa = Ala, Phe, Gly, Ile, Lys, Leu, Met, Pro, Gln, Arg, Ser, Thr, Val, Trp or Tyr
  MOD_RES (29)...(29): Xaa = Ala, Asp, Glu, Phe, Gly, His, Lys, Leu, Met, Asn, Pro, Gln, Arg, Ser, Thr, Val or Trp
  MOD_RES (30)...(30): Xaa = Ala, Asp, Glu, Gly, Ile, Lys, Leu, Met, Asn, Pro, Gln, Arg, Ser, Thr, Val or Tyr
  MOD_RES (31)...(31): Xaa = Ala, Asp, Glu, Phe, Gly, His, Ile, Lys, Leu, Met, Asn, Gln, Ser, Thr or Val
  MOD_RES (32)...(32): Xaa = Glu, Phe, Gly, His, Ile, Lys, Leu, Met, Asn, Pro, Gln, Arg, Ser, Thr or Trp
  MOD_RES (33)...(33): Xaa = Ala, Asp, Glu, Phe, Gly, His, Lys, Leu, Met, Asn, Pro, Gln, Arg, Ser, Thr, Val or Tyr
  MOD_RES (34)...(34): Xaa = Ala, Asp, Glu, Phe, Gly, His, Ile, Lys, Met, Asn, Gln, Arg, Ser, Thr, Val or Tyr
CXXXXCXXXCXXXXXXXXXCXCXXXXXXXXXXXXC

SEQ ID NO: 264 - protein, 32 aa, Artificial Sequence
  EGF domain monomer sequence
  MOD_RES (2)...(2): Xaa = Ala, Asp, Glu, Gly, Ile, Lys, Leu, Gln, Arg, Ser, Thr or Val
  MOD_RES (3)...(3): Xaa = Ala, Asp, Glu, Phe, Gly, His, Ile, Lys, Leu, Met, Asn, Pro, Gln, Arg, Ser, Thr or Val
  MOD_RES (4)...(4): Xaa = Ala, Glu, Phe, Gly, His, Leu, Asn, Pro, Gln, Arg, Ser, Thr, Trp or Tyr
  MOD_RES (5)...(5): Xaa = Ala, Asp, Glu, Phe, Gly, His, Ile, Lys, Leu, Asn, Pro, Arg, Ser or Thr
  MOD_RES (6)...(6): Xaa = Ala, Phe, Gly, Ile, Lys, Leu, Met, Asn, Pro, Gln, Arg, Ser, Thr, Val or Tyr
  MOD_RES (8)...(8): Xaa = Ala, Asp, Glu, Phe, Gly, His, Ile, Lys, Leu, Met, Asn, Pro, Gln, Arg, Ser, Thr or Val
  MOD_RES (9)...(9): Xaa = Ala, Asp, Glu, Phe, Gly, His, Lys, Leu, Asn, Pro, Gln, Arg, Ser, Thr or Tyr
  MOD_RES (10)...(10): Xaa = Ala, Gly or Thr
  MOD_RES (11)...(11): Xaa = Ala, Asp, Glu, Phe, His, Ile, Lys, Leu, Met, Asn, Gln, Arg, Ser, Thr or Val
  MOD_RES (13)...(13): Xaa = Ala, Asp, Glu, Phe, Gly, His, Ile, Lys, Leu, Met, Asn, Gln, Arg, Ser, Thr, Val, Trp or Tyr
  MOD_RES (14)...(14): Xaa = Ala, Asp, Glu, Lys, Leu, Asn, Pro, Gln, Arg, Ser, Thr or Val
  MOD_RES (15)...(15): Xaa = Ala, Cys, Asp, Glu, Phe, Gly, His, Ile, Lys, Leu, Met, Asn, Pro, Gln, Arg, Ser, Thr, Val or Tyr
  MOD_RES (16)...(16): Xaa = Ala, Asp, Glu, Phe, Gly, His, Ile, Lys, Leu, Met, Asn, Pro, Gln, Arg, Ser, Thr, Val, Trp or Tyr
  MOD_RES (17)...(17): Xaa = Ala, Asp, Glu, Phe, Gly, His, Ile, Lys, Leu, Asn, Pro, Gln, Arg, Ser, Thr, Val or Trp
  MOD_RES (18)...(18): Xaa = Ala, Asp, Glu, Gly, His, Lys, Leu, Met, Asn, Gln, Arg, Ser, Thr, Val, Trp or Tyr
  MOD_RES (19)...(19): Xaa = Ala, Phe, His, Ile, Leu, Pro, Arg, Thr, Val or Tyr
  MOD_RES (20)...(20): Xaa = Ala, Asp, Glu, Phe, His, Ile, Lys, Leu, Met, Asn, Gln, Arg, Ser, Thr, Val, Trp or Tyr
  MOD_RES (22)...(22): Xaa = Ala, Asp, Glu, Phe, Gly, His, Ile, Lys, Leu, Met, Asn, Pro, Gln, Arg, Ser, Thr, Val, Trp or Tyr
  MOD_RES (24)...(24): Xaa = Ala, Asp, Glu, Phe, His, Lys, Leu, Met, Asn, Pro, Gln, Arg, Ser, Thr, Val, Trp or Tyr
  MOD_RES (25)...(25): Xaa = Ala, Asp, Glu, Phe, Gly, His, Lys, Leu, Asn, Pro, Gln, Arg, Ser, Thr, Val or Tyr
  MOD_RES (26)...(26): Xaa = Ala, Glu, Gly, His, Lys, Leu, Asn, Pro, Arg, Ser, Thr or Tyr
  MOD_RES (27)...(27): Xaa = Phe, His, Ile, Leu, Met, Arg, Thr, Trp or Tyr
  MOD_RES (28)...(28): Xaa = Ala, Asp, Glu, Phe, Gly, His, Ile, Lys, Leu, Met, Asn, Gln, Arg, Ser, Thr, Val or Tyr
  MOD_RES (29)...(29): Xaa = Asp, Gly or Ser
  MOD_RES (30)...(30): Xaa = Ala, Asp, Glu, Phe, His, Ile, Lys, Leu, Asn, Pro, Gln, Arg, Ser, Thr, Val or Tyr
  MOD_RES (31)...(31): Xaa = Ala, Asp, Glu, Phe, His, Ile, Lys, Leu, Met, Asn, Gln, Arg, Ser, Thr or Tyr
CXXXXXCXXXXCXXXXXXXXCXCXXXXXXXXC

SEQ ID NO: 265 - protein, 33 aa, Artificial Sequence
  EGF domain monomer sequence
  MOD_RES (2)...(2): Xaa = Ala, Asp, Glu, Gly, Ile, Lys, Leu, Gln, Arg, Ser, Thr or Val
  MOD_RES (3)...(3): Xaa = Ala, Asp, Glu, Phe, Gly, His, Ile, Lys, Leu, Met, Asn, Pro, Gln, Arg, Ser, Thr or Val
  MOD_RES (4)...(4): Xaa = Ala, Glu, Phe, Gly, His, Leu, Asn, Pro, Gln, Arg, Ser, Thr, Trp or Tyr
  MOD_RES (5)...(5): Xaa = Ala, Asp, Glu, Phe, Gly, His, Ile, Lys, Leu, Asn, Pro, Arg, Ser or Thr
  MOD_RES (6)...(6): Xaa = Ala, Phe, Gly, Ile, Lys, Leu, Met, Asn, Pro, Gln, Arg, Ser, Thr, Val or Tyr
  MOD_RES (8)...(8): Xaa = Ala, Asp, Glu, Phe, Gly, His, Ile, Lys, Leu, Met, Asn, Pro, Gln, Arg, Ser, Thr or Val
  MOD_RES (9)...(9): Xaa = Ala, Asp, Glu, Phe, Gly, His, Lys, Leu, Asn, Pro, Gln, Arg, Ser, Thr or Tyr
  MOD_RES (10)...(10): Xaa = Ala, Gly or Thr
  MOD_RES (11)...(11): Xaa = Ala, Asp, Glu, Phe, His, Ile, Lys, Leu, Met, Asn, Gln, Arg, Ser, Thr or Val
  MOD_RES (13)...(13): Xaa = Ala, Asp, Glu, Phe, Gly, His, Ile, Lys, Leu, Met, Asn, Gln, Arg, Ser, Thr, Val, Trp or Tyr
  MOD_RES (14)...(14): Xaa = Ala, Asp, Glu, Lys, Leu, Asn, Pro, Gln, Arg, Ser, Thr or Val
  MOD_RES (15)...(15): Xaa = Ala, Cys, Asp, Glu, Phe, Gly, His, Ile, Lys, Leu, Met, Asn, Pro, Gln, Arg, Ser, Thr, Val or Tyr
  MOD_RES (16)...(16): Xaa = Ala, Asp, Glu, Phe, Gly, His, Ile, Lys, Leu, Met, Asn, Pro, Gln, Arg, Ser, Thr, Val, Trp or Tyr
  MOD_RES (17)...(17): Xaa = Ala, Asp, Glu, Phe, Gly, His, Ile, Lys, Leu, Asn, Pro, Gln, Arg, Ser, Thr, Val or Trp
  MOD_RES (18)...(18): Xaa = Ala, Asp, Glu, Gly, His, Lys, Leu, Met, Asn, Gln, Arg, Ser, Thr, Val, Trp or Tyr
  MOD_RES (19)...(19): Xaa = Ala, Phe, His, Ile, Leu, Pro, Arg, Thr, Val or Tyr
  MOD_RES (20)...(20): Xaa = Ala, Asp, Glu, Phe, His, Ile, Lys, Leu, Met, Asn, Gln, Arg, Ser, Thr, Val, Trp or Tyr
  MOD_RES (22)...(22): Xaa = Ala, Asp, Glu, Phe, Gly, His, Ile, Lys, Leu, Met, Asn, Pro, Gln, Arg, Ser, Thr, Val, Trp or Tyr
  MOD_RES (24)...(24): Xaa = Ala, Asp, Glu, Phe, Gly, His, Ile, Lys, Leu, Asn, Pro, Gln, Arg, Ser, Thr, Val or Tyr
  MOD_RES (25)...(25): Xaa = Ala, Asp, Glu, Phe, His, Ile, Lys, Leu, Met, Asn, Pro, Gln, Arg, Ser, Thr or Val
  MOD_RES (26)...(26): Xaa = Asp, Glu, Gly, Asn, Pro or Ser
  MOD_RES (27)...(27): Xaa = Ala, Asp, Glu, Phe, His, Leu, Met, Gln, Arg, Ser, Thr, Trp or Tyr
  MOD_RES (28)...(28): Xaa = Ala, Asp, Glu, Phe, Gly, His, Ile, Lys, Leu, Met, Asn, Gln, Arg, Ser, Thr, Val or Tyr
  MOD_RES (29)...(29): Xaa = Ala, Phe, Gly, Ile, Lys, Leu, Met, Pro, Gln, Arg, Ser, Thr, Val, Trp or Tyr
  MOD_RES (30)...(30): Xaa = Ala, Asp, Glu, Phe, Gly, His, Lys, Leu, Met, Asn, Pro, Gln, Arg, Ser, Thr, Val or Trp
  MOD_RES (31)...(31): Xaa = Ala, Asp, Glu, Gly, Ile, Lys, Leu, Met, Asn, Pro, Gln, Arg, Ser, Thr, Val or Tyr
  MOD_RES (32)...(32): Xaa = Ala, Asp, Glu, Phe, Gly, His, Ile, Lys, Leu, Met, Asn, Gln, Ser, Thr or Val
CXXXXXCXXXXCXXXXXXXXCXCXXXXXXXXXC

SEQ ID NO: 266 - protein, 34 aa, Artificial Sequence
  EGF domain monomer sequence
  MOD_RES (2)...(2): Xaa = Ala, Asp, Glu, Gly, Ile, Lys, Leu, Gln, Arg, Ser, Thr or Val
  MOD_RES (3)...(3): Xaa = Ala, Asp, Glu, Phe, Gly, His, Ile, Lys, Leu, Met, Asn, Pro, Gln, Arg, Ser, Thr or Val
  MOD_RES (4)...(4): Xaa = Ala, Glu, Phe, Gly, His, Leu, Asn, Pro, Gln, Arg, Ser, Thr, Trp or Tyr
  MOD_RES (5)...(5): Xaa = Ala, Asp, Glu, Phe, Gly, His, Ile, Lys, Leu, Asn, Pro, Arg, Ser or Thr
  MOD_RES (6)...(6): Xaa = Ala, Phe, Gly, Ile, Lys, Leu, Met, Asn, Pro, Gln, Arg, Ser, Thr, Val or Tyr
  MOD_RES (8)...(8): Xaa = Ala, Asp, Glu, Phe, Gly, His, Ile, Lys, Leu, Met, Asn, Pro, Gln, Arg, Ser, Thr or Val
  MOD_RES (9)...(9): Xaa = Ala, Asp, Glu, Phe, Gly, His, Lys, Leu, Asn, Pro, Gln, Arg, Ser, Thr or Tyr
  MOD_RES (10)...(10): Xaa = Ala, Gly or Thr
  MOD_RES (11)...(11): Xaa = Ala, Asp, Glu, Phe, His, Ile, Lys, Leu, Met, Asn, Gln, Arg, Ser, Thr or Val
  MOD_RES (13)...(13): Xaa = Ala, Asp, Glu, Phe, Gly, His, Ile, Lys, Leu, Met, Asn, Gln, Arg, Ser, Thr, Val, Trp or Tyr
  MOD_RES (14)...(14): Xaa = Ala, Asp, Glu, Lys, Leu, Asn, Pro, Gln, Arg, Ser, Thr or Val
  MOD_RES (15)...(15): Xaa = Ala, Cys, Asp, Glu, Phe, Gly, His, Ile, Lys, Leu, Met, Asn, Pro, Gln, Arg, Ser, Thr, Val or Tyr
  MOD_RES (16)...(16): Xaa = Ala, Asp, Glu, Phe, Gly, His, Ile, Lys, Leu, Met, Asn, Pro, Gln, Arg, Ser, Thr, Val, Trp or Tyr
  MOD_RES (17)...(17): Xaa = Ala, Asp, Glu, Phe, Gly, His, Ile, Lys, Leu, Asn, Pro, Gln, Arg, Ser, Thr, Val or Trp
  MOD_RES (18)...(18): Xaa = Ala, Asp, Glu, Gly, His, Lys, Leu, Met, Asn, Gln, Arg, Ser, Thr, Val, Trp or Tyr
  MOD_RES (19)...(19): Xaa = Ala, Phe, His, Ile, Leu, Pro, Arg, Thr, Val or Tyr
  MOD_RES (20)...(20): Xaa = Ala, Asp, Glu, Phe, His, Ile, Lys, Leu, Met, Asn, Gln, Arg, Ser, Thr, Val, Trp or Tyr
  MOD_RES (22)...(22): Xaa = Ala, Asp, Glu, Phe, Gly, His, Ile, Lys, Leu, Met, Asn, Pro, Gln, Arg, Ser, Thr, Val, Trp or Tyr
  MOD_RES (24)...(24): Xaa = Ala, Asp, Glu, Phe, Gly, His, Ile, Lys, Leu, Asn, Pro, Gln, Arg, Ser, Thr, Val or Tyr
  MOD_RES (25)...(25): Xaa = Ala, Asp, Glu, Phe, His, Ile, Lys, Leu, Met, Asn, Pro, Gln, Arg, Ser, Thr or Val
  MOD_RES (26)...(26): Xaa = Asp, Glu, Gly, Asn, Pro or Ser
  MOD_RES (27)...(27): Xaa = Ala, Asp, Glu, Phe, His, Leu, Met, Gln, Arg, Ser, Thr, Trp or Tyr
  MOD_RES (28)...(28): Xaa = Ala, Asp, Glu, Phe, Gly, His, Ile, Lys, Leu, Met, Asn, Gln, Arg, Ser, Thr, Val or Tyr
  MOD_RES (29)...(29): Xaa = Ala, Phe, Gly, Ile, Lys, Leu, Met, Pro, Gln, Arg, Ser, Thr, Val, Trp or Tyr
  MOD_RES (30)...(30): Xaa = Ala, Asp, Glu, Phe, Gly, His, Lys, Leu, Met, Asn, Pro, Gln, Arg, Ser, Thr, Val or Trp
  MOD_RES (31)...(31): Xaa = Ala, Asp, Glu, Gly, Ile, Lys, Leu, Met, Asn, Pro, Gln, Arg, Ser, Thr, Val or Tyr
  MOD_RES (32)...(32): Xaa = Ala, Asp, Glu, Phe, Gly, His, Ile, Lys, Leu, Met, Asn, Gln, Ser, Thr or Val
  MOD_RES (33)...(33): Xaa = Glu, Phe, Gly, His, Ile, Lys, Leu, Met, Asn, Pro, Gln, Arg, Ser, Thr or Trp
CXXXXXCXXXXCXXXXXXXXCXCXXXXXXXXXXC

SEQ ID NO: 267 - protein, 35 aa, Artificial Sequence
  EGF domain monomer sequence
  MOD_RES (2)...(2): Xaa = Ala, Asp, Glu, Gly, Ile, Lys, Leu, Gln, Arg, Ser, Thr or Val
  MOD_RES (3)...(3): Xaa = Ala, Asp, Glu, Phe, Gly, His, Ile, Lys, Leu, Met, Asn, Pro, Gln, Arg, Ser, Thr or Val
  MOD_RES (4)...(4): Xaa = Ala, Glu, Phe, Gly, His, Leu, Asn, Pro, Gln, Arg, Ser, Thr, Trp or Tyr
  MOD_RES (5)...(5): Xaa = Ala, Asp, Glu, Phe, Gly, His, Ile, Lys, Leu, Asn, Pro, Arg, Ser or Thr
  MOD_RES (6)...(6): Xaa = Ala, Phe, Gly, Ile, Lys, Leu, Met, Asn, Pro, Gln, Arg, Ser, Thr, Val or Tyr
  MOD_RES (8)...(8): Xaa = Ala, Asp, Glu, Phe, Gly, His, Ile, Lys, Leu, Met, Asn, Pro, Gln, Arg, Ser, Thr or Val
  MOD_RES (9)...(9): Xaa = Ala, Asp, Glu, Phe, Gly, His, Lys, Leu, Asn, Pro, Gln, Arg, Ser, Thr or Tyr
  MOD_RES (10)...(10): Xaa = Ala, Gly or Thr
  MOD_RES (11)...(11): Xaa = Ala, Asp, Glu, Phe, His, Ile, Lys, Leu, Met, Asn, Gln, Arg, Ser, Thr or Val
  MOD_RES (13)...(13): Xaa = Ala, Asp, Glu, Phe, Gly, His, Ile, Lys, Leu, Met, Asn, Gln, Arg, Ser, Thr, Val, Trp or Tyr
  MOD_RES (14)...(14): Xaa = Ala, Asp, Glu, Lys, Leu, Asn, Pro, Gln, Arg, Ser, Thr or Val
  MOD_RES (15)...(15): Xaa = Ala, Cys, Asp, Glu, Phe, Gly, His, Ile, Lys, Leu, Met, Asn, Pro, Gln, Arg, Ser, Thr, Val or Tyr
  MOD_RES (16)...(16): Xaa = Ala, Asp, Glu, Phe, Gly, His, Ile, Lys, Leu, Met, Asn, Pro, Gln, Arg, Ser, Thr, Val, Trp or Tyr
  MOD_RES (17)...(17): Xaa = Ala, Asp, Glu, Phe, Gly, His, Ile, Lys, Leu, Asn, Pro, Gln, Arg, Ser, Thr, Val or Trp
  MOD_RES (18)...(18): Xaa = Ala, Asp, Glu, Gly, His, Lys, Leu, Met, Asn, Gln, Arg, Ser, Thr, Val, Trp or Tyr
  MOD_RES (19)...(19): Xaa = Ala, Phe, His, Ile, Leu, Pro, Arg, Thr, Val or Tyr
  MOD_RES (20)...(20): Xaa = Ala, Asp, Glu, Phe, His, Ile, Lys, Leu, Met, Asn, Gln, Arg, Ser, Thr, Val, Trp or Tyr
  MOD_RES (22)...(22): Xaa = Ala, Asp, Glu, Phe, Gly, His, Ile, Lys, Leu, Met, Asn, Pro, Gln, Arg, Ser, Thr, Val, Trp or Tyr
  MOD_RES (24)...(24): Xaa = Ala, Asp, Glu, Phe, Gly, His, Ile, Lys, Leu, Asn, Pro, Gln, Arg, Ser, Thr, Val or Tyr
  MOD_RES (25)...(25): Xaa = Ala, Asp, Glu, Phe, His, Ile, Lys, Leu, Met, Asn, Pro, Gln, Arg, Ser, Thr or Val
  MOD_RES (26)...(26): Xaa = Asp, Glu, Gly, Asn, Pro or Ser
  MOD_RES (27)...(27): Xaa = Ala, Asp, Glu, Phe, His, Leu, Met, Gln, Arg, Ser, Thr, Trp or Tyr
  MOD_RES (28)...(28): Xaa = Ala, Asp, Glu, Phe, Gly, His, Ile, Lys, Leu, Met, Asn, Gln, Arg, Ser, Thr, Val or Tyr
  MOD_RES (29)...(29): Xaa = Ala, Phe, Gly, Ile, Lys, Leu, Met, Pro, Gln, Arg, Ser, Thr, Val, Trp or Tyr
  MOD_RES (30)...(30): Xaa = Ala, Asp, Glu, Phe, Gly, His, Lys, Leu, Met, Asn, Pro, Gln, Arg, Ser, Thr, Val or Trp
  MOD_RES (31)...(31): Xaa = Ala, Asp, Glu, Gly, Ile, Lys, Leu, Met, Asn, Pro, Gln, Arg, Ser, Thr, Val or Tyr
  MOD_RES (32)...(32): Xaa = Ala, Asp, Glu, Phe, Gly, His, Ile, Lys, Leu, Met, Asn, Gln, Ser, Thr or Val
  MOD_RES (33)...(33): Xaa = Glu, Phe, Gly, His, Ile, Lys, Leu, Met, Asn, Pro, Gln, Arg, Ser, Thr or Trp
CXXXXXCXXXXCXXXXXXXXCXCXXXXXXXXXXXC

SEQ ID NO: 268 - protein, 36 aa, Artificial Sequence
  EGF domain monomer sequence
  MOD_RES (2)...(2): Xaa = Ala, Asp, Glu, Gly, Ile, Lys, Leu, Gln, Arg, Ser, Thr or Val
  MOD_RES (3)...(3): Xaa = Ala, Asp, Glu, Phe, Gly, His, Ile, Lys, Leu, Met, Asn, Pro, Gln, Arg, Ser, Thr or Val
  MOD_RES (4)...(4): Xaa = Ala, Glu, Phe, Gly, His, Leu, Asn, Pro, Gln, Arg, Ser, Thr, Trp or Tyr
  MOD_RES (5)...(5): Xaa = Ala, Asp, Glu, Phe, Gly, His, Ile, Lys, Leu, Asn, Pro, Arg, Ser or Thr
  MOD_RES (6)...(6): Xaa = Ala, Phe, Gly, Ile, Lys, Leu, Met, Asn, Pro, Gln, Arg, Ser, Thr, Val or Tyr
  MOD_RES (8)...(8): Xaa = Ala, Asp, Glu, Phe, Gly, His, Ile, Lys, Leu, Met, Asn, Pro, Gln, Arg, Ser, Thr or Val
  MOD_RES (9)...(9): Xaa = Ala, Asp, Glu, Phe, Gly, His, Lys, Leu, Asn, Pro, Gln, Arg, Ser, Thr or Tyr
  MOD_RES (10)...(10): Xaa = Ala, Gly or Thr
  MOD_RES (11)...(11): Xaa = Ala, Asp, Glu, Phe, His, Ile, Lys, Leu, Met, Asn, Gln, Arg, Ser, Thr or Val
  MOD_RES (13)...(13): Xaa = Ala, Asp, Glu, Phe, Gly, His, Ile, Lys, Leu, Met, Asn, Gln, Arg, Ser, Thr, Val, Trp or Tyr
  MOD_RES (14)...(14): Xaa = Ala, Asp, Glu, Lys, Leu, Asn, Pro, Gln, Arg, Ser, Thr or Val
  MOD_RES (15)...(15): Xaa = Ala, Cys, Asp, Glu, Phe, Gly, His, Ile, Lys, Leu, Met, Asn, Pro, Gln, Arg, Ser, Thr, Val or Tyr
  MOD_RES (16)...(16): Xaa = Ala, Asp, Glu, Phe, Gly, His, Ile, Lys, Leu, Met, Asn, Pro, Gln, Arg, Ser, Thr, Val, Trp or Tyr
  MOD_RES (17)...(17): Xaa = Ala, Asp, Glu, Phe, Gly, His, Ile, Lys, Leu, Asn, Pro, Gln, Arg, Ser, Thr, Val or Trp
  MOD_RES (18)...(18): Xaa = Ala, Asp, Glu, Gly, His, Lys, Leu, Met, Asn, Gln, Arg, Ser, Thr, Val, Trp or Tyr
  MOD_RES (19)...(19): Xaa = Ala, Phe, His, Ile, Leu, Pro, Arg, Thr, Val or Tyr
  MOD_RES (20)...(20): Xaa = Ala, Asp, Glu, Phe, His, Ile, Lys, Leu, Met, Asn, Gln, Arg, Ser, Thr, Val, Trp or Tyr
  MOD_RES (22)...(22): Xaa = Ala, Asp, Glu, Phe, Gly, His, Ile, Lys, Leu, Met, Asn, Pro, Gln, Arg, Ser, Thr, Val, Trp or Tyr
  MOD_RES (24)...(24): Xaa = Ala, Asp, Glu, Phe, Gly, His, Ile, Lys, Leu, Asn, Pro, Gln, Arg, Ser, Thr, Val or Tyr
  MOD_RES (25)...(25): Xaa = Ala, Asp, Glu, Phe, His, Ile, Lys, Leu, Met, Asn, Pro, Gln, Arg, Ser, Thr or Val
  MOD_RES (26)...(26): Xaa = Asp, Glu, Gly, Asn, Pro or Ser
  MOD_RES (27)...(27): Xaa = Ala, Asp, Glu, Phe, His, Leu, Met, Gln, Arg, Ser, Thr, Trp or Tyr
  MOD_RES (28)...(28): Xaa = Ala, Asp, Glu, Phe, Gly, His, Ile, Lys, Leu, Met, Asn, Gln, Arg, Ser, Thr, Val or Tyr
  MOD_RES (29)...(29): Xaa = Ala, Phe, Gly, Ile, Lys, Leu, Met, Pro, Gln, Arg, Ser, Thr, Val, Trp or Tyr
  MOD_RES (30)...(30): Xaa = Ala, Asp, Glu, Phe, Gly, His, Lys, Leu, Met, Asn, Pro, Gln, Arg, Ser, Thr, Val or Trp
  MOD_RES (31)...(31): Xaa = Ala, Asp, Glu, Gly, Ile, Lys, Leu, Met, Asn, Pro, Gln, Arg, Ser, Thr, Val or Tyr
  MOD_RES (32)...(32): Xaa = Ala, Asp, Glu, Phe, Gly, His, Ile, Lys, Leu, Met, Asn, Gln, Ser, Thr or Val
  MOD_RES (33)...(33): Xaa = Glu, Phe, Gly, His, Ile, Lys, Leu, Met, Asn, Pro, Gln, Arg, Ser, Thr or Trp
  MOD_RES (34)...(34): Xaa = Ala, Asp, Glu, Phe, Gly, His, Lys, Leu, Met, Asn, Pro, Gln, Arg, Ser, Thr, Val or Tyr
  MOD_RES (35)...(35): Xaa = Ala, Asp, Glu, Phe, Gly, His, Ile, Lys, Met, Asn, Gln, Arg, Ser, Thr, Val or Tyr
CXXXXXCXXXXCXXXXXXXXCXCXXXXXXXXXXXXC

SEQ ID NO: 269 - protein, 33 aa, Artificial Sequence
  EGF domain monomer sequence
  MOD_RES (2)...(2): Xaa = Ala, Asp, Glu, Phe, Gly, Ile, Lys, Leu, Met, Asn, Pro, Gln, Arg, Ser, Thr, Val or Tyr
  MOD_RES (3)...(3): Xaa = Ala, Asp, Glu, Phe, Gly, His, Ile, Lys, Leu, Met, Asn, Pro, Gln, Arg, Ser, Thr, Val or Tyr
  MOD_RES (4)...(4): Xaa = Ala, Asp, Glu, Phe, Gly, His, Ile, Lys, Leu, Met, Asn, Pro, Gln, Arg, Ser, Thr, Val or Trp
  MOD_RES (5)...(5): Xaa = Ala, Asp, Glu, Phe, Gly, His, Ile, Lys, Leu, Met, Asn, Pro, Gln, Arg, Ser, Thr or Val
  MOD_RES (6)...(6): Xaa = Ala, Asp, Glu, Phe, Gly, His, Ile, Lys, Leu, Asn, Pro, Gln, Arg, Ser, Val or Tyr
  MOD_RES (7)...(7): Xaa = Ala, Asp, Glu, Gly, Ile, Lys, Leu, Met, Asn, Pro, Gln, Arg, Ser, Thr, Val or Tyr
  MOD_RES (9)...(9): Xaa = Ala, Asp, Glu, Phe, Gly, His, Ile, Lys, Leu, Met, Asn, Pro, Gln, Arg, Ser, Thr or Val
  MOD_RES (10)...(10): Xaa = Ala, Asp, Glu, Phe, Gly, His, Lys, Leu, Asn, Pro, Gln, Arg, Ser, Thr or Tyr
  MOD_RES (11)...(11): Xaa = Ala, Gly or Thr
  MOD_RES (12)...(12): Xaa = Ala, Asp, Glu, Phe, His, Ile, Lys, Leu, Met, Asn, Gln, Arg, Ser, Thr or Val
  MOD_RES (14)...(14): Xaa = Ala, Asp, Glu, Phe, Gly, His, Ile, Lys, Leu, Met, Asn, Gln, Arg, Ser, Thr, Val, Trp or Tyr
  MOD_RES (15)...(15): Xaa = Ala, Asp, Glu, Lys, Leu, Asn, Pro, Gln, Arg, Ser, Thr or Val
  MOD_RES (16)...(16): Xaa = Ala, Cys, Asp, Glu, Phe, Gly, His, Ile, Lys, Leu, Met, Asn, Pro, Gln, Arg, Ser, Thr, Val or Tyr
  MOD_RES (17)...(17): Xaa = Ala, Asp, Glu, Phe, Gly, His, Ile, Lys, Leu, Met, Asn, Pro, Gln, Arg, Ser, Thr, Val, Trp or Tyr
  MOD_RES (18)...(18): Xaa = Ala, Asp, Glu, Phe, Gly, His, Ile, Lys, Leu, Asn, Pro, Gln, Arg, Ser, Thr, Val or Trp
  MOD_RES (19)...(19): Xaa = Ala, Asp, Glu, Gly, His, Lys, Leu, Met, Asn, Gln, Arg, Ser, Thr, Val, Trp or Tyr
  MOD_RES (20)...(20): Xaa = Ala, Phe, His, Ile, Leu, Pro, Arg, Thr, Val or Tyr
  MOD_RES (21)...(21): Xaa = Ala, Asp, Glu, Phe, His, Ile, Lys, Leu, Met, Asn, Gln, Arg, Ser, Thr, Val, Trp or Tyr
  MOD_RES (23)...(23): Xaa = Ala, Asp, Glu, Phe, Gly, His, Ile, Lys, Leu, Met, Asn, Pro, Gln, Arg, Ser, Thr, Val, Trp or Tyr
  MOD_RES (25)...(25): Xaa = Ala, Asp, Glu, Phe, His, Lys, Leu, Met, Asn, Pro, Gln, Arg, Ser, Thr, Val, Trp or Tyr
  MOD_RES (26)...(26): Xaa = Ala, Asp, Glu, Phe, Gly, His, Lys, Leu, Asn, Pro, Gln, Arg, Ser, Thr, Val or Tyr
  MOD_RES (27)...(27): Xaa = Ala, Glu, Gly, His, Lys, Leu, Asn, Pro, Arg, Ser, Thr or Tyr
  MOD_RES (28)...(28): Xaa = Phe, His, Ile, Leu, Met, Arg, Thr, Trp or Tyr
  MOD_RES (29)...(29): Xaa = Ala, Asp, Glu, Phe, Gly, His, Ile, Lys, Leu, Met, Asn, Gln, Arg, Ser, Thr, Val or Tyr
  MOD_RES (30)...(30): Xaa = Asp, Gly or Ser
  MOD_RES (31)...(31): Xaa = Ala, Asp, Glu, Phe, His, Ile, Lys, Leu, Asn, Pro, Gln, Arg, Ser, Thr, Val or Tyr
  MOD_RES (32)...(32): Xaa = Ala, Asp, Glu, Phe, His, Ile, Lys, Leu, Met, Asn, Gln, Arg, Ser, Thr or Tyr
CXXXXXXCXXXXCXXXXXXXXCXCXXXXXXXXC

SEQ ID NO: 270 - protein, 34 aa, Artificial Sequence
  EGF domain monomer sequence
  MOD_RES (2)...(2): Xaa = Ala, Asp, Glu, Phe, Gly, Ile, Lys, Leu, Met, Asn, Pro, Gln, Arg, Ser, Thr, Val or Tyr
  MOD_RES (3)...(3): Xaa = Ala, Asp, Glu, Phe, Gly, His, Ile, Lys, Leu, Met, Asn, Pro, Gln, Arg, Ser, Thr, Val or Tyr
  MOD_RES (4)...(4): Xaa = Ala, Asp, Glu, Phe, Gly, His, Ile, Lys, Leu, Met, Asn, Pro, Gln, Arg, Ser, Thr, Val or Trp
  MOD_RES (5)...(5): Xaa = Ala, Asp, Glu, Phe, Gly, His, Ile, Lys, Leu, Met, Asn, Pro, Gln, Arg, Ser, Thr or Val
  MOD_RES (6)...(6): Xaa = Ala, Asp, Glu, Phe, Gly, His, Ile, Lys, Leu, Asn, Pro, Gln, Arg, Ser, Val or Tyr
  MOD_RES (7)...(7): Xaa = Ala, Asp, Glu, Gly, Ile, Lys, Leu, Met, Asn, Pro, Gln, Arg, Ser, Thr, Val or Tyr
  MOD_RES (9)...(9): Xaa = Ala, Asp, Glu, Phe, Gly, His, Ile, Lys, Leu, Met, Asn, Pro, Gln, Arg, Ser, Thr or Val
  MOD_RES (10)...(10): Xaa = Ala, Asp, Glu, Phe, Gly, His, Lys, Leu, Asn, Pro, Gln, Arg, Ser, Thr or Tyr
  MOD_RES (11)...(11): Xaa = Ala, Gly or Thr
  MOD_RES (12)...(12): Xaa = Ala, Asp, Glu, Phe, His, Ile, Lys, Leu, Met, Asn, Gln, Arg, Ser, Thr or Val
  MOD_RES (14)...(14): Xaa = Ala, Asp, Glu, Phe, Gly, His, Ile, Lys, Leu, Met, Asn, Gln, Arg, Ser, Thr, Val, Trp or Tyr
  MOD_RES (15)...(15): Xaa = Ala, Asp, Glu, Lys, Leu, Asn, Pro, Gln, Arg, Ser, Thr or Val
  MOD_RES (16)...(16): Xaa = Ala, Cys, Asp, Glu, Phe, Gly, His, Ile, Lys, Leu, Met, Asn, Pro, Gln, Arg, Ser, Thr, Val or Tyr
  MOD_RES (17)...(17): Xaa = Ala, Asp, Glu, Phe, Gly, His, Ile, Lys, Leu, Met, Asn, Pro, Gln, Arg, Ser, Thr, Val, Trp or Tyr
  MOD_RES (18)...(18): Xaa = Ala, Asp, Glu, Phe, Gly, His, Ile, Lys, Leu, Asn, Pro, Gln, Arg, Ser, Thr, Val or Trp
  MOD_RES (19)...(19): Xaa = Ala, Asp, Glu, Gly, His, Lys, Leu, Met, Asn, Gln, Arg, Ser, Thr, Val, Trp or Tyr
  MOD_RES (20)...(20): Xaa = Ala, Phe, His, Ile, Leu, Pro, Arg, Thr, Val or Tyr
  MOD_RES (21)...(21): Xaa = Ala, Asp, Glu, Phe, His, Ile, Lys, Leu, Met, Asn, Gln, Arg, Ser, Thr, Val, Trp or Tyr
  MOD_RES (23)...(23): Xaa = Ala, Asp, Glu, Phe, Gly, His, Ile, Lys, Leu, Met, Asn, Pro, Gln, Arg, Ser, Thr, Val, Trp or Tyr
  MOD_RES (25)...(25): Xaa = Ala, Asp, Glu, Phe, Gly, His, Ile, Lys, Leu, Asn, Pro, Gln, Arg, Ser, Thr, Val or Tyr
  MOD_RES (26)...(26): Xaa = Ala, Asp, Glu, Phe, His, Ile, Lys, Leu, Met, Asn, Pro, Gln, Arg, Ser, Thr or Val
  MOD_RES (27)...(27): Xaa = Asp, Glu, Gly, Asn, Pro or Ser
  MOD_RES (28)...(28): Xaa = Ala, Asp, Glu, Phe, His, Leu, Met, Gln, Arg, Ser, Thr, Trp or Tyr
  MOD_RES (29)...(29): Xaa = Ala, Asp, Glu, Phe, Gly, His, Ile, Lys, Leu, Met, Asn, Gln, Arg, Ser, Thr, Val or Tyr
  MOD_RES (30)...(30): Xaa = Ala, Phe, Gly, Ile, Lys, Leu, Met, Pro, Gln, Arg, Ser, Thr, Val, Trp or Tyr
  MOD_RES (31)...(31): Xaa = Ala, Asp, Glu, Phe, Gly, His, Lys, Leu, Met, Asn, Pro, Gln, Arg, Ser, Thr, Val or Trp
  MOD_RES (32)...(32): Xaa = Ala, Asp, Glu, Gly, Ile, Lys, Leu, Met, Asn, Pro, Gln, Arg, Ser, Thr, Val or Tyr
  MOD_RES (33)...(33): Xaa = Ala, Asp, Glu, Phe, Gly, His, Ile, Lys, Leu, Met, Asn, Gln, Ser, Thr or Val
CXXXXXXCXXXXCXXXXXXXXCXCXXXXXXXXXC

SEQ ID NO: 271 - protein, 35 aa, Artificial Sequence
  EGF domain monomer sequence
  MOD_RES (2)...(2): Xaa = Ala, Asp, Glu, Phe, Gly, Ile, Lys, Leu, Met, Asn, Pro, Gln, Arg, Ser, Thr, Val or Tyr
  MOD_RES (3)...(3): Xaa = Ala, Asp, Glu, Phe, Gly, His, Ile, Lys, Leu, Met, Asn, Pro, Gln, Arg, Ser, Thr, Val or Tyr
  MOD_RES (4)...(4): Xaa = Ala, Asp, Glu, Phe, Gly, His, Ile, Lys, Leu, Met, Asn, Pro, Gln, Arg, Ser, Thr, Val or Trp
  MOD_RES (5)...(5): Xaa = Ala, Asp, Glu, Phe, Gly, His, Ile, Lys, Leu, Met, Asn, Pro, Gln, Arg, Ser, Thr or Val
  MOD_RES (6)...(6): Xaa = Ala, Asp, Glu, Phe, Gly, His, Ile, Lys, Leu, Asn, Pro, Gln, Arg, Ser, Val or Tyr
  MOD_RES (7)...(7): Xaa = Ala, Asp, Glu, Gly, Ile, Lys, Leu, Met, Asn, Pro, Gln, Arg, Ser, Thr, Val or Tyr
  MOD_RES (9)...(9): Xaa = Ala, Asp, Glu, Phe, Gly, His, Ile, Lys, Leu, Met, Asn, Pro, Gln, Arg, Ser, Thr or Val
  MOD_RES (10)...(10): Xaa = Ala, Asp, Glu, Phe, Gly, His, Lys, Leu, Asn, Pro, Gln, Arg, Ser, Thr or Tyr
  MOD_RES (11)...(11): Xaa = Ala, Gly or Thr
  MOD_RES (12)...(12): Xaa = Ala, Asp, Glu, Phe, His, Ile, Lys, Leu, Met, Asn, Gln, Arg, Ser, Thr or Val
  MOD_RES (14)...(14): Xaa = Ala, Asp, Glu, Phe, Gly, His, Ile, Lys, Leu, Met, Asn, Gln, Arg, Ser, Thr, Val, Trp or Tyr
  MOD_RES (15)...(15): Xaa = Ala, Asp, Glu, Lys, Leu, Asn, Pro, Gln, Arg, Ser, Thr or Val
  MOD_RES (16)...(16): Xaa = Ala, Cys, Asp, Glu, Phe, Gly, His, Ile, Lys, Leu, Met, Asn, Pro, Gln, Arg, Ser, Thr, Val or Tyr
  MOD_RES (17)...(17): Xaa = Ala, Asp, Glu, Phe, Gly, His, Ile, Lys, Leu, Met, Asn, Pro, Gln, Arg, Ser, Thr, Val, Trp or Tyr
  MOD_RES (18)...(18): Xaa = Ala, Asp, Glu, Phe, Gly, His, Ile, Lys, Leu, Asn, Pro, Gln, Arg, Ser, Thr, Val or Trp
  MOD_RES (19)...(19): Xaa = Ala, Asp, Glu, Gly, His, Lys, Leu, Met, Asn, Gln, Arg, Ser, Thr, Val, Trp or Tyr
  MOD_RES (20)...(20): Xaa = Ala, Phe, His, Ile, Leu, Pro, Arg, Thr, Val or Tyr
  MOD_RES (21)...(21): Xaa = Ala, Asp, Glu, Phe, His, Ile, Lys, Leu, Met, Asn, Gln, Arg, Ser, Thr, Val, Trp or Tyr
  MOD_RES (23)...(23): Xaa = Ala, Asp, Glu, Phe, Gly, His, Ile, Lys, Leu, Met, Asn, Pro, Gln, Arg, Ser, Thr, Val, Trp or Tyr
  MOD_RES (25)...(25): Xaa = Ala, Asp, Glu, Phe, Gly, His, Ile, Lys, Leu, Asn, Pro, Gln, Arg, Ser, Thr, Val or Tyr
  MOD_RES (26)...(26): Xaa = Ala, Asp, Glu, Phe, His, Ile, Lys, Leu, Met, Asn, Pro, Gln, Arg, Ser, Thr or Val
  MOD_RES (27)...(27): Xaa = Asp, Glu, Gly, Asn, Pro or Ser
  MOD_RES (28)...(28): Xaa = Ala, Asp, Glu, Phe, His, Leu, Met, Gln, Arg, Ser, Thr, Trp or Tyr
  MOD_RES (29)...(29): Xaa = Ala, Asp, Glu, Phe, Gly, His, Ile, Lys, Leu, Met, Asn, Gln, Arg, Ser, Thr, Val or Tyr
  MOD_RES (30)...(30): Xaa = Ala, Phe, Gly, Ile, Lys, Leu, Met, Pro, Gln, Arg, Ser, Thr, Val, Trp or Tyr
  MOD_RES (31)...(31): Xaa = Ala, Asp, Glu, Phe, Gly, His, Lys, Leu, Met, Asn, Pro, Gln, Arg, Ser, Thr, Val or Trp
  MOD_RES (32)...(32): Xaa = Ala, Asp, Glu, Gly, Ile, Lys, Leu, Met, Asn, Pro, Gln, Arg, Ser, Thr, Val or Tyr
  MOD_RES (33)...(33): Xaa = Ala, Asp, Glu, Phe, Gly, His, Ile, Lys, Leu, Met, Asn, Gln, Ser, Thr or Val
  MOD_RES (34)...(34): Xaa = Glu, Phe, Gly, His, Ile, Lys, Leu, Met, Asn, Pro, Gln, Arg, Ser, Thr or Trp
CXXXXXXCXXXXCXXXXXXXXCXCXXXXXXXXXXC

SEQ ID NO: 272 - protein, 36 aa, Artificial Sequence
  EGF domain monomer sequence
  MOD_RES (2)...(2): Xaa = Ala, Asp, Glu, Phe, Gly, Ile, Lys, Leu, Met, Asn, Pro, Gln, Arg, Ser, Thr, Val or Tyr
  MOD_RES (3)...(3): Xaa = Ala, Asp, Glu, Phe, Gly, His, Ile, Lys, Leu, Met, Asn, Pro, Gln, Arg, Ser, Thr, Val or Tyr
  MOD_RES (4)...(4): Xaa = Ala, Asp, Glu, Phe, Gly, His, Ile, Lys, Leu, Met, Asn, Pro, Gln, Arg, Ser, Thr, Val or Trp
  MOD_RES (5)...(5): Xaa = Ala, Asp, Glu, Phe, Gly, His, Ile, Lys, Leu, Met, Asn, Pro, Gln, Arg, Ser, Thr or Val
  MOD_RES (6)...(6): Xaa = Ala, Asp, Glu, Phe, Gly, His, Ile, Lys, Leu, Asn, Pro, Gln, Arg, Ser, Val or Tyr
  MOD_RES (7)...(7): Xaa = Ala, Asp, Glu, Gly, Ile, Lys, Leu, Met, Asn, Pro, Gln, Arg, Ser, Thr, Val or Tyr
  MOD_RES (9)...(9): Xaa = Ala, Asp, Glu, Phe, Gly, His, Ile, Lys, Leu, Met, Asn, Pro, Gln, Arg, Ser, Thr or Val
  MOD_RES (10)...(10): Xaa = Ala, Asp, Glu, Phe, Gly, His, Lys, Leu, Asn, Pro, Gln, Arg, Ser, Thr or Tyr
  MOD_RES (11)...(11): Xaa = Ala, Gly or Thr
  MOD_RES (12)...(12): Xaa = Ala, Asp, Glu, Phe, His, Ile, Lys, Leu, Met, Asn, Gln, Arg, Ser, Thr or Val
  MOD_RES (14)...(14): Xaa = Ala, Asp, Glu, Phe, Gly, His, Ile, Lys, Leu, Met, Asn, Gln, Arg, Ser, Thr, Val, Trp or Tyr
  MOD_RES (15)...(15): Xaa = Ala, Asp, Glu, Lys, Leu, Asn, Pro, Gln, Arg, Ser, Thr or Val
  MOD_RES (16)...(16): Xaa = Ala, Cys, Asp, Glu, Phe, Gly, His, Ile, Lys, Leu, Met, Asn, Pro, Gln, Arg, Ser, Thr, Val or Tyr
  MOD_RES (17)...(17): Xaa = Ala, Asp, Glu, Phe, Gly, His, Ile, Lys, Leu, Met, Asn, Pro, Gln, Arg, Ser, Thr, Val, Trp or Tyr
  MOD_RES (18)...(18): Xaa = Ala, Asp, Glu, Phe, Gly, His, Ile, Lys, Leu, Asn, Pro, Gln, Arg, Ser, Thr, Val or Trp
  MOD_RES (19)...(19): Xaa = Ala, Asp, Glu, Gly, His, Lys, Leu, Met, Asn, Gln, Arg, Ser, Thr, Val, Trp or Tyr
  MOD_RES (20)...(20): Xaa = Ala, Phe, His, Ile, Leu, Pro, Arg, Thr, Val or Tyr
  MOD_RES (21)...(21): Xaa = Ala, Asp, Glu, Phe, His, Ile, Lys, Leu, Met, Asn, Gln, Arg, Ser, Thr, Val, Trp or Tyr
  MOD_RES (23)...(23): Xaa = Ala, Asp, Glu, Phe, Gly, His, Ile, Lys, Leu, Met, Asn, Pro, Gln, Arg, Ser, Thr, Val, Trp or Tyr
  MOD_RES (25)...(25): Xaa = Ala, Asp, Glu, Phe, Gly, His, Ile, Lys, Leu, Asn, Pro, Gln, Arg, Ser, Thr, Val or Tyr
  MOD_RES (26)...(26): Xaa = Ala, Asp, Glu, Phe, His, Ile, Lys, Leu, Met, Asn, Pro, Gln, Arg, Ser, Thr or Val
  MOD_RES (27)...(27): Xaa = Asp, Glu, Gly, Asn, Pro or Ser
  MOD_RES (28)...(28): Xaa = Ala, Asp, Glu, Phe, His, Leu, Met, Gln, Arg, Ser, Thr, Trp or Tyr
  MOD_RES (29)...(29): Xaa = Ala, Asp, Glu, Phe, Gly, His, Ile, Lys, Leu, Met, Asn, Gln, Arg, Ser, Thr, Val or Tyr
  MOD_RES (30)...(30): Xaa = Ala, Phe, Gly, Ile, Lys, Leu, Met, Pro, Gln, Arg, Ser, Thr, Val, Trp or Tyr
  MOD_RES (31)...(31): Xaa = Ala, Asp, Glu, Phe, Gly, His, Lys, Leu, Met, Asn, Pro, Gln, Arg, Ser, Thr, Val or Trp
  MOD_RES (32)...(32): Xaa = Ala, Asp, Glu, Gly, Ile, Lys, Leu, Met, Asn, Pro, Gln, Arg, Ser, Thr, Val or Tyr
  MOD_RES (33)...(33): Xaa = Ala, Asp, Glu, Phe, Gly, His, Ile, Lys, Leu, Met, Asn, Gln, Ser, Thr or Val
  MOD_RES (34)...(34): Xaa = Glu, Phe, Gly, His, Ile, Lys, Leu, Met, Asn, Pro, Gln, Arg, Ser, Thr or Trp
  MOD_RES (35)...(35): Xaa = Ala, Asp, Glu, Phe, Gly, His, Lys, Leu, Met, Asn, Pro, Gln, Arg, Ser, Thr, Val or Tyr
CXXXXXXCXXXXCXXXXXXXXCXCXXXXXXXXXXXC

SEQ ID NO: 273 - protein, 37 aa, Artificial Sequence
  EGF domain monomer sequence
  MOD_RES (2)...(2): Xaa = Ala, Asp, Glu, Phe, Gly, Ile, Lys, Leu, Met, Asn, Pro, Gln, Arg, Ser, Thr, Val or Tyr
  MOD_RES (3)...(3): Xaa = Ala, Asp, Glu, Phe, Gly, His, Ile, Lys, Leu, Met, Asn, Pro, Gln, Arg, Ser, Thr, Val or Tyr
  MOD_RES (4)...(4): Xaa = Ala, Asp, Glu, Phe, Gly, His, Ile, Lys, Leu, Met, Asn, Pro, Gln, Arg, Ser, Thr, Val or Trp
  MOD_RES (5)...(5): Xaa = Ala, Asp, Glu, Phe, Gly, His, Ile, Lys, Leu, Met, Asn, Pro, Gln, Arg, Ser, Thr or Val
  MOD_RES (6)...(6): Xaa = Ala, Asp, Glu, Phe, Gly, His, Ile, Lys, Leu, Asn, Pro, Gln, Arg, Ser, Val or Tyr
  MOD_RES (7)...(7): Xaa = Ala, Asp, Glu, Gly, Ile, Lys, Leu, Met, Asn, Pro, Gln, Arg, Ser, Thr, Val or Tyr
  MOD_RES (9)...(9): Xaa = Ala, Asp, Glu, Phe, Gly, His, Ile, Lys, Leu, Met, Asn, Pro, Gln, Arg, Ser, Thr or Val
  MOD_RES (10)...(10): Xaa = Ala, Asp, Glu, Phe, Gly, His, Lys, Leu, Asn, Pro, Gln, Arg, Ser, Thr or Tyr
  MOD_RES (11)...(11): Xaa = Ala, Gly or Thr
  MOD_RES (12)...(12): Xaa = Ala, Asp, Glu, Phe, His, Ile, Lys, Leu, Met, Asn, Gln, Arg, Ser, Thr or Val
  MOD_RES (14)...(14): Xaa = Ala, Asp, Glu, Phe, Gly, His, Ile, Lys, Leu, Met, Asn, Gln, Arg, Ser, Thr, Val, Trp or Tyr
  MOD_RES (15)...(15): Xaa = Ala, Asp, Glu, Lys, Leu, Asn, Pro, Gln, Arg, Ser, Thr or Val
  MOD_RES (16)...(16): Xaa = Ala, Cys, Asp, Glu, Phe, Gly, His, Ile, Lys, Leu, Met, Asn, Pro, Gln, Arg, Ser, Thr, Val or Tyr
  MOD_RES (17)...(17): Xaa = Ala, Asp, Glu, Phe, Gly, His, Ile, Lys, Leu, Met, Asn, Pro, Gln, Arg, Ser, Thr, Val, Trp or Tyr
  MOD_RES (18)...(18): Xaa = Ala, Asp, Glu, Phe, Gly, His, Ile, Lys, Leu, Asn, Pro, Gln, Arg, Ser, Thr, Val or Trp
  MOD_RES (19)...(19): Xaa = Ala, Asp, Glu, Gly, His, Lys, Leu, Met, Asn, Gln, Arg, Ser, Thr, Val, Trp or Tyr
  MOD_RES (20)...(20): Xaa = Ala, Phe, His, Ile, Leu, Pro, Arg, Thr, Val or Tyr
  MOD_RES (21)...(21): Xaa = Ala, Asp, Glu, Phe, His, Ile, Lys, Leu, Met, Asn, Gln, Arg, Ser, Thr, Val, Trp or Tyr
  MOD_RES (23)...(23): Xaa = Ala, Asp, Glu, Phe, Gly, His, Ile, Lys, Leu, Met, Asn, Pro, Gln, Arg, Ser, Thr, Val, Trp or Tyr
  MOD_RES (25)...(25): Xaa = Ala, Asp, Glu, Phe, Gly, His, Ile, Lys, Leu, Asn, Pro, Gln, Arg, Ser, Thr, Val or Tyr
  MOD_RES (26)...(26): Xaa = Ala, Asp, Glu, Phe, His, Ile, Lys, Leu, Met, Asn, Pro, Gln, Arg, Ser, Thr or Val
  MOD_RES (27)...(27): Xaa = Asp, Glu, Gly, Asn, Pro or Ser
  MOD_RES (28)...(28): Xaa = Ala, Asp, Glu, Phe, His, Leu, Met, Gln, Arg, Ser, Thr, Trp or Tyr
  MOD_RES (29)...(29): Xaa = Ala, Asp, Glu, Phe, Gly, His, Ile, Lys, Leu, Met, Asn, Gln, Arg, Ser, Thr, Val or Tyr
  MOD_RES (30)...(30): Xaa = Ala, Phe, Gly, Ile, Lys, Leu, Met, Pro, Gln, Arg, Ser, Thr, Val, Trp or Tyr
  MOD_RES (31)...(31): Xaa = Ala, Asp, Glu, Phe, Gly, His, Lys, Leu, Met, Asn, Pro, Gln, Arg, Ser, Thr, Val or Trp
  MOD_RES (32)...(32): Xaa = Ala, Asp, Glu, Gly, Ile, Lys, Leu, Met, Asn, Pro, Gln, Arg, Ser, Thr, Val or Tyr
  MOD_RES (33)...(33): Xaa = Ala, Asp, Glu, Phe, Gly, His, Ile, Lys, Leu, Met, Asn, Gln, Ser, Thr or Val
  MOD_RES (34)...(34): Xaa = Glu, Phe, Gly, His, Ile, Lys, Leu, Met, Asn, Pro, Gln, Arg, Ser, Thr or Trp
  MOD_RES (35)...(35): Xaa = Ala, Asp, Glu, Phe, Gly, His, Lys, Leu, Met, Asn, Pro, Gln, Arg, Ser, Thr, Val or Tyr
  MOD_RES (36)...(36): Xaa = Ala, Asp, Glu, Phe, Gly, His, Ile, Lys, Met, Asn, Gln, Arg, Ser, Thr, Val or Tyr
CXXXXXXCXXXXCXXXXXXXXCXCXXXXXXXXXXXXC

SEQ ID NO: 274 - protein, 33 aa, Artificial Sequence
  EGF domain monomer sequence
  MOD_RES (2)...(2): Xaa = Ala, Asp, Glu, Gly, Ile, Lys, Leu, Gln, Arg, Ser, Thr or Val
  MOD_RES (3)...(3): Xaa = Ala, Asp, Glu, Phe, Gly, His, Ile, Lys, Leu, Met, Asn, Pro, Gln, Arg, Ser, Thr or Val
  MOD_RES (4)...(4): Xaa = Ala, Glu, Phe, Gly, His, Leu, Asn, Pro, Gln, Arg, Ser, Thr, Trp or Tyr
  MOD_RES (5)...(5): Xaa = Ala, Asp, Glu, Phe, Gly, His, Ile, Lys, Leu, Asn, Pro, Arg, Ser or Thr
  MOD_RES (6)...(6): Xaa = Ala, Phe, Gly, Ile, Lys, Leu, Met, Asn, Pro, Gln, Arg, Ser, Thr, Val or Tyr
  MOD_RES (8)...(8): Xaa = Ala, Cys, Asp, Glu, Phe, Gly, His, Lys, Leu, Met, Asn, Pro, Gln, Arg, Ser, Val or Tyr
  MOD_RES (9)...(9): Xaa = Ala, Asp, Glu, Gly, His, Ile, Lys, Leu, Met, Asn, Pro, Gln, Arg, Ser, Thr, Val or Tyr
  MOD_RES (10)...(10): Xaa = Ala, Asp, Glu, Phe, Gly, His, Lys, Leu, Asn, Gln, Arg, Ser, Thr or Tyr
  MOD_RES (11)...(11): Xaa = Ala, Phe, Gly, His, Gln, Ser, Thr or Val
  MOD_RES (12)...(12): Xaa = Ala, Asp, Glu, Phe, His, Ile, Lys, Leu, Met, Asn, Gln, Arg, Ser, Thr or Val
  MOD_RES (14)...(14): Xaa = Ala, Asp, Glu, Phe, Gly, His, Ile, Lys, Leu, Met, Asn, Gln, Arg, Ser, Thr, Val, Trp or Tyr
  MOD_RES (15)...(15): Xaa = Ala, Asp, Glu, Lys, Leu, Asn, Pro, Gln, Arg, Ser, Thr or Val
  MOD_RES (16)...(16): Xaa = Ala, Cys, Asp, Glu, Phe, Gly, His, Ile, Lys, Leu, Met, Asn, Pro, Gln, Arg, Ser, Thr, Val or Tyr
  MOD_RES (17)...(17): Xaa = Ala, Asp, Glu, Phe, Gly, His, Ile, Lys, Leu, Met, Asn, Pro, Gln, Arg, Ser, Thr, Val, Trp or Tyr
  MOD_RES (18)...(18): Xaa = Ala, Asp, Glu, Phe, Gly, His, Ile, Lys, Leu, Asn, Pro, Gln, Arg, Ser, Thr, Val or Trp
  MOD_RES (19)...(19): Xaa = Ala, Asp, Glu, Gly, His, Lys, Leu, Met, Asn, Gln, Arg, Ser, Thr, Val, Trp or Tyr
  MOD_RES (20)...(20): Xaa = Ala, Phe, His, Ile, Leu, Pro, Arg, Thr, Val or Tyr
  MOD_RES (21)...(21): Xaa = Ala, Asp, Glu, Phe, His, Ile, Lys, Leu, Met, Asn, Gln, Arg, Ser, Thr, Val, Trp or Tyr
  MOD_RES (23)...(23): Xaa = Ala, Asp, Glu, Phe, Gly, His, Ile, Lys, Leu, Met, Asn, Pro, Gln, Arg, Ser, Thr, Val, Trp or Tyr
  MOD_RES (25)...(25): Xaa = Ala, Asp, Glu, Phe, His, Lys, Leu, Met, Asn, Pro, Gln, Arg, Ser, Thr, Val, Trp or Tyr
  MOD_RES (26)...(26): Xaa = Ala, Asp, Glu, Phe, Gly, His, Lys, Leu, Asn, Pro, Gln, Arg, Ser, Thr, Val or Tyr
  MOD_RES (27)...(27): Xaa = Ala, Glu, Gly, His, Lys, Leu, Asn, Pro, Arg, Ser, Thr or Tyr
  MOD_RES (28)...(28): Xaa = Phe, His, Ile, Leu, Met, Arg, Thr, Trp or Tyr
  MOD_RES (29)...(29): Xaa = Ala, Asp, Glu, Phe, Gly, His, Ile, Lys, Leu, Met, Asn, Gln, Arg, Ser, Thr, Val or Tyr
  MOD_RES (30)...(30): Xaa = Asp, Gly or Ser
  MOD_RES (31)...(31): Xaa = Ala, Asp, Glu, Phe, His, Ile, Lys, Leu, Asn, Pro, Gln, Arg, Ser, Thr, Val or Tyr
  MOD_RES (32)...(32): Xaa = Ala, Asp, Glu, Phe, His, Ile, Lys, Leu, Met, Asn, Gln, Arg, Ser, Thr or Tyr
CXXXXXCXXXXXCXXXXXXXXCXCXXXXXXXXC

SEQ ID NO: 275 - protein, 34 aa, Artificial Sequence
  EGF domain monomer sequence
  MOD_RES (2)...(2): Xaa = Ala, Asp, Glu, Gly, Ile, Lys, Leu, Gln, Arg, Ser, Thr or Val
  MOD_RES (3)...(3): Xaa = Ala, Asp, Glu, Phe, Gly, His, Ile, Lys, Leu, Met, Asn, Pro, Gln, Arg, Ser, Thr or Val
  MOD_RES (4)...(4): Xaa = Ala, Glu, Phe, Gly, His, Leu, Asn, Pro, Gln, Arg, Ser, Thr, Trp or Tyr
  MOD_RES (5)...(5): Xaa = Ala, Asp, Glu, Phe, Gly, His, Ile, Lys, Leu, Asn, Pro, Arg, Ser or Thr
  MOD_RES (6)...(6): Xaa = Ala, Phe, Gly, Ile, Lys, Leu, Met, Asn, Pro, Gln, Arg, Ser, Thr, Val or Tyr
  MOD_RES (8)...(8): Xaa = Ala, Cys, Asp, Glu, Phe, Gly, His, Lys, Leu, Met, Asn, Pro, Gln, Arg, Ser, Val or Tyr
  MOD_RES (9)...(9): Xaa = Ala, Asp, Glu, Gly, His, Ile, Lys, Leu, Met, Asn, Pro, Gln, Arg, Ser, Thr, Val or Tyr
  MOD_RES (10)...(10): Xaa = Ala, Asp, Glu, Phe, Gly, His, Lys, Leu, Asn, Gln, Arg, Ser, Thr or Tyr
  MOD_RES (11)...(11): Xaa = Ala, Phe, Gly, His, Gln, Ser, Thr or Val
  MOD_RES (12)...(12): Xaa = Ala, Asp, Glu, Phe, His, Ile, Lys, Leu, Met, Asn, Gln, Arg, Ser, Thr or Val
  MOD_RES (14)...(14): Xaa = Ala, Asp, Glu, Phe, Gly, His, Ile, Lys, Leu, Met, Asn, Gln, Arg, Ser, Thr, Val, Trp or Tyr
  MOD_RES (15)...(15): Xaa = Ala, Asp, Glu, Lys, Leu, Asn, Pro, Gln, Arg, Ser, Thr or Val
  MOD_RES (16)...(16): Xaa = Ala, Cys, Asp, Glu, Phe, Gly, His, Ile, Lys, Leu, Met, Asn, Pro, Gln, Arg, Ser, Thr, Val or Tyr
  MOD_RES (17)...(17): Xaa = Ala, Asp, Glu, Phe, Gly, His, Ile, Lys, Leu, Met, Asn, Pro, Gln, Arg, Ser, Thr, Val, Trp or Tyr
  MOD_RES (18)...(18): Xaa = Ala, Asp, Glu, Phe, Gly, His, Ile, Lys, Leu, Asn, Pro, Gln, Arg, Ser, Thr, Val or Trp
  MOD_RES (19)...(19): Xaa = Ala, Asp, Glu, Gly, His, Lys, Leu, Met, Asn, Gln, Arg, Ser, Thr, Val, Trp or Tyr
  MOD_RES (20)...(20): Xaa = Ala, Phe, His, Ile, Leu, Pro, Arg, Thr, Val or Tyr
  MOD_RES (21)...(21): Xaa = Ala, Asp, Glu, Phe, His, Ile, Lys, Leu, Met, Asn, Gln, Arg, Ser, Thr, Val, Trp or Tyr
  MOD_RES (23)...(23): Xaa = Ala, Asp, Glu, Phe, Gly, His, Ile, Lys, Leu, Met, Asn, Pro, Gln, Arg, Ser, Thr, Val, Trp or Tyr
  MOD_RES (25)...(25): Xaa = Ala, Asp, Glu, Phe, Gly, His, Ile, Lys, Leu, Asn, Pro, Gln, Arg, Ser, Thr, Val or Tyr
  MOD_RES (26)...(26): Xaa = Ala, Asp, Glu, Phe, His, Ile, Lys, Leu, Met, Asn, Pro, Gln, Arg, Ser, Thr or Val
  MOD_RES (27)...(27): Xaa = Asp, Glu, Gly, Asn, Pro or Ser
  MOD_RES (28)...(28): Xaa = Ala, Asp, Glu, Phe, His, Leu, Met, Gln, Arg, Ser, Thr, Trp or Tyr
  MOD_RES (29)...(29): Xaa = Ala, Asp, Glu, Phe, Gly, His, Ile, Lys, Leu, Met, Asn, Gln, Arg, Ser, Thr, Val or Tyr
  MOD_RES (30)...(30): Xaa = Ala, Phe, Gly, Ile, Lys, Leu, Met, Pro, Gln, Arg, Ser, Thr, Val, Trp or Tyr
  MOD_RES (31)...(31): Xaa = Ala, Asp, Glu, Phe, Gly, His, Lys, Leu, Met, Asn, Pro, Gln, Arg, Ser, Thr, Val or Trp
  MOD_RES (32)...(32): Xaa = Ala, Asp, Glu, Gly, Ile, Lys, Leu, Met, Asn, Pro, Gln, Arg, Ser, Thr, Val or Tyr
  MOD_RES (33)...(33): Xaa = Ala, Asp, Glu, Phe, Gly, His, Ile, Lys, Leu, Met, Asn, Gln, Ser, Thr or Val
CXXXXXCXXXXXCXXXXXXXXCXCXXXXXXXXXC

SEQ ID NO: 276 - protein, 35 aa, Artificial Sequence
  EGF domain monomer sequence
  MOD_RES (2)...(2): Xaa = Ala, Asp, Glu, Gly, Ile, Lys, Leu, Gln, Arg, Ser, Thr or Val
  MOD_RES (3)...(3): Xaa = Ala, Asp, Glu, Phe, Gly, His, Ile, Lys, Leu, Met, Asn, Pro, Gln, Arg, Ser, Thr or Val
  MOD_RES (4)...(4): Xaa = Ala, Glu, Phe, Gly, His, Leu, Asn, Pro, Gln, Arg, Ser, Thr, Trp or Tyr
  MOD_RES (5)...(5): Xaa = Ala, Asp, Glu, Phe, Gly, His, Ile, Lys, Leu, Asn, Pro, Arg, Ser or Thr
  MOD_RES (6)...(6): Xaa = Ala, Phe, Gly, Ile, Lys, Leu, Met, Asn, Pro, Gln, Arg, Ser, Thr, Val or Tyr
  MOD_RES (8)...(8): Xaa = Ala, Cys, Asp, Glu, Phe, Gly, His, Lys, Leu, Met, Asn, Pro, Gln, Arg, Ser, Val or Tyr
  MOD_RES (9)...(9): Xaa = Ala, Asp, Glu, Gly, His, Ile, Lys, Leu, Met, Asn, Pro, Gln, Arg, Ser, Thr, Val or Tyr
  MOD_RES (10)...(10): Xaa = Ala, Asp, Glu, Phe, Gly, His, Lys, Leu, Asn, Gln, Arg, Ser, Thr or Tyr
  MOD_RES (11)...(11): Xaa = Ala, Phe, Gly, His, Gln, Ser, Thr or Val
  MOD_RES (12)...(12): Xaa = Ala, Asp, Glu, Phe, His, Ile, Lys, Leu, Met, Asn, Gln, Arg, Ser, Thr or Val
  MOD_RES (14)...(14): Xaa = Ala, Asp, Glu, Phe, Gly, His, Ile, Lys, Leu, Met, Asn, Gln, Arg, Ser, Thr, Val, Trp or Tyr
  MOD_RES (15)...(15): Xaa = Ala, Asp, Glu, Lys, Leu, Asn, Pro, Gln, Arg, Ser, Thr or Val
  MOD_RES (16)...(16): Xaa = Ala, Cys, Asp, Glu, Phe, Gly, His, Ile, Lys, Leu, Met, Asn, Pro, Gln, Arg, Ser, Thr, Val or Tyr
  MOD_RES (17)...(17): Xaa = Ala, Asp, Glu, Phe, Gly, His, Ile, Lys, Leu, Met, Asn, Pro, Gln, Arg, Ser, Thr, Val, Trp or Tyr
  MOD_RES (18)...(18): Xaa = Ala, Asp, Glu, Phe, Gly, His, Ile, Lys, Leu, Asn, Pro, Gln, Arg, Ser, Thr, Val or Trp
  MOD_RES (19)...(19): Xaa = Ala, Asp, Glu, Gly, His, Lys, Leu, Met, Asn, Gln, Arg, Ser, Thr, Val, Trp or Tyr
  MOD_RES (20)...(20): Xaa = Ala, Phe, His, Ile, Leu, Pro, Arg, Thr, Val or Tyr
  MOD_RES (21)...(21): Xaa = Ala, Asp, Glu, Phe, His, Ile, Lys, Leu, Met, Asn, Gln, Arg, Ser, Thr, Val, Trp or Tyr
  MOD_RES (23)...(23): Xaa = Ala, Asp, Glu, Phe, Gly, His, Ile, Lys, Leu, Met, Asn, Pro, Gln, Arg, Ser, Thr, Val, Trp or Tyr
  MOD_RES (25)...(25): Xaa = Ala, Asp, Glu, Phe, Gly, His, Ile, Lys, Leu, Asn, Pro, Gln, Arg, Ser, Thr, Val or Tyr
  MOD_RES (26)...(26): Xaa = Ala, Asp, Glu, Phe, His, Ile, Lys, Leu, Met, Asn, Pro, Gln, Arg, Ser, Thr or Val
  MOD_RES (27)...(27): Xaa = Asp, Glu, Gly, Asn, Pro or Ser
  MOD_RES (28)...(28): Xaa = Ala, Asp, Glu, Phe, His, Leu, Met, Gln, Arg, Ser, Thr, Trp or Tyr
  MOD_RES (29)...(29): Xaa = Ala, Asp, Glu, Phe, Gly, His, Ile, Lys, Leu, Met, Asn, Gln, Arg, Ser, Thr, Val or Tyr
  MOD_RES (30)...(30): Xaa = Ala, Phe, Gly, Ile, Lys, Leu, Met, Pro, Gln, Arg, Ser, Thr, Val, Trp or Tyr
  MOD_RES (31)...(31): Xaa = Ala, Asp, Glu, Phe, Gly, His, Lys, Leu, Met, Asn, Pro, Gln, Arg, Ser, Thr, Val or Trp
  MOD_RES (32)...(32): Xaa = Ala, Asp, Glu, Gly, Ile, Lys, Leu, Met, Asn, Pro, Gln, Arg, Ser, Thr, Val or Tyr
  MOD_RES (33)...(33): Xaa = Ala, Asp, Glu, Phe, Gly, His, Ile, Lys, Leu, Met, Asn, Gln, Ser, Thr or Val
  MOD_RES (34)...(34): Xaa = Glu, Phe, Gly, His, Ile, Lys, Leu, Met, Asn, Pro, Gln, Arg, Ser, Thr or Trp
CXXXXXCXXXXXCXXXXXXXXCXCXXXXXXXXXXC

SEQ ID NO: 277 - protein, 36 aa, Artificial Sequence
  EGF domain monomer sequence
  MOD_RES (2)...(2): Xaa = Ala, Asp, Glu, Gly, Ile, Lys, Leu, Gln, Arg, Ser, Thr or Val
  MOD_RES (3)...(3): Xaa = Ala, Asp, Glu, Phe, Gly, His, Ile, Lys, Leu, Met, Asn, Pro, Gln, Arg, Ser, Thr or Val
  MOD_RES (4)...(4): Xaa = Ala, Glu, Phe, Gly, His, Leu, Asn, Pro, Gln, Arg, Ser, Thr, Trp or Tyr
  MOD_RES (5)...(5): Xaa = Ala, Asp, Glu, Phe, Gly, His, Ile, Lys, Leu, Asn, Pro, Arg, Ser or Thr
  MOD_RES (6)...(6): Xaa = Ala, Phe, Gly, Ile, Lys, Leu, Met, Asn, Pro, Gln, Arg, Ser, Thr, Val or Tyr
  MOD_RES (8)...(8): Xaa = Ala, Cys, Asp, Glu, Phe, Gly, His, Lys, Leu, Met, Asn, Pro, Gln, Arg, Ser, Val or Tyr
  MOD_RES (9)...(9): Xaa = Ala, Asp, Glu, Gly, His, Ile, Lys, Leu, Met, Asn, Pro, Gln, Arg, Ser, Thr, Val or Tyr
  MOD_RES (10)...(10): Xaa = Ala, Asp, Glu, Phe, Gly, His, Lys, Leu, Asn, Gln, Arg, Ser, Thr or Tyr
  MOD_RES (11)...(11): Xaa = Ala, Phe, Gly, His, Gln, Ser, Thr or Val
  MOD_RES (12)...(12): Xaa = Ala, Asp, Glu, Phe, His, Ile, Lys, Leu, Met, Asn, Gln, Arg, Ser, Thr or Val
  MOD_RES (14)...(14): Xaa = Ala, Asp, Glu, Phe, Gly, His, Ile, Lys, Leu, Met, Asn, Gln, Arg, Ser, Thr, Val, Trp or Tyr
  MOD_RES (15)...(15): Xaa = Ala, Asp, Glu, Lys, Leu, Asn, Pro, Gln, Arg, Ser, Thr or Val
  MOD_RES (16)...(16): Xaa = Ala, Cys, Asp, Glu, Phe, Gly, His, Ile, Lys, Leu, Met, Asn, Pro, Gln, Arg, Ser, Thr, Val or Tyr
  MOD_RES (17)...(17): Xaa = Ala, Asp, Glu, Phe, Gly, His, Ile, Lys, Leu, Met, Asn, Pro, Gln, Arg, Ser, Thr, Val, Trp or Tyr
  MOD_RES (18)...(18): Xaa = Ala, Asp, Glu, Phe, Gly, His, Ile, Lys, Leu, Asn, Pro, Gln, Arg, Ser, Thr, Val or Trp
  MOD_RES (19)...(19): Xaa = Ala, Asp, Glu, Gly, His, Lys, Leu, Met, Asn, Gln, Arg, Ser, Thr, Val, Trp or Tyr
  MOD_RES (20)...(20): Xaa = Ala, Phe, His, Ile, Leu, Pro, Arg, Thr, Val or Tyr
  MOD_RES (21)...(21): Xaa = Ala, Asp, Glu, Phe, His, Ile, Lys, Leu, Met, Asn, Gln, Arg, Ser, Thr, Val, Trp or Tyr
  MOD_RES (23)...(23): Xaa = Ala, Asp, Glu, Phe, Gly, His, Ile, Lys, Leu, Met, Asn, Pro, Gln, Arg, Ser, Thr, Val, Trp or Tyr
  MOD_RES (25)...(25): Xaa = Ala, Asp, Glu, Phe, Gly, His, Ile, Lys, Leu, Asn, Pro, Gln, Arg, Ser, Thr, Val or Tyr
  MOD_RES (26)...(26): Xaa = Ala, Asp, Glu, Phe, His, Ile, Lys, Leu, Met, Asn, Pro, Gln, Arg, Ser, Thr or Val
  MOD_RES (27)...(27): Xaa = Asp, Glu, Gly, Asn, Pro or Ser
  MOD_RES (28)...(28): Xaa = Ala, Asp, Glu, Phe, His, Leu, Met, Gln, Arg, Ser, Thr, Trp or Tyr
  MOD_RES (29)...(29): Xaa = Ala, Asp, Glu, Phe, Gly, His, Ile, Lys, Leu, Met, Asn, Gln, Arg, Ser, Thr, Val or Tyr
  MOD_RES (30)...(30): Xaa = Ala, Phe, Gly, Ile, Lys, Leu, Met, Pro, Gln, Arg, Ser, Thr, Val, Trp or Tyr
  MOD_RES (31)...(31): Xaa = Ala, Asp, Glu, Phe, Gly, His, Lys, Leu, Met, Asn, Pro, Gln, Arg, Ser, Thr, Val or Trp
  MOD_RES (32)...(32): Xaa = Ala, Asp, Glu, Gly, Ile, Lys, Leu, Met, Asn, Pro, Gln, Arg, Ser, Thr, Val or Tyr
  MOD_RES (33)...(33): Xaa = Ala, Asp, Glu, Phe, Gly, His, Ile, Lys, Leu, Met, Asn, Gln, Ser, Thr or Val
  MOD_RES (34)...(34): Xaa = Glu, Phe, Gly, His, Ile, Lys, Leu, Met, Asn, Pro, Gln, Arg, Ser, Thr or Trp
  MOD_RES (35)...(35): Xaa = Ala, Asp, Glu, Phe, Gly, His, Lys, Leu, Met, Asn, Pro, Gln, Arg, Ser, Thr, Val or Tyr
CXXXXXCXXXXXCXXXXXXXXCXCXXXXXXXXXXXC

SEQ ID NO: 278 - protein, 37 aa, Artificial Sequence
  EGF domain monomer sequence
  MOD_RES (2)...(2): Xaa = Ala, Asp, Glu, Gly, Ile, Lys, Leu, Gln, Arg, Ser, Thr or Val
  MOD_RES (3)...(3): Xaa = Ala, Asp, Glu, Phe, Gly, His, Ile, Lys, Leu, Met, Asn, Pro, Gln, Arg, Ser, Thr or Val
  MOD_RES (4)...(4): Xaa = Ala, Glu, Phe, Gly, His, Leu, Asn, Pro, Gln, Arg, Ser, Thr, Trp or Tyr
  MOD_RES (5)...(5): Xaa = Ala, Asp, Glu, Phe, Gly, His, Ile, Lys, Leu, Asn, Pro, Arg, Ser or Thr
  MOD_RES (6)...(6): Xaa = Ala, Phe, Gly, Ile, Lys, Leu, Met, Asn, Pro, Gln, Arg, Ser, Thr, Val or Tyr
  MOD_RES (8)...(8): Xaa = Ala, Cys, Asp, Glu, Phe, Gly, His, Lys, Leu, Met, Asn, Pro, Gln, Arg, Ser, Val or Tyr
  MOD_RES (9)...(9): Xaa = Ala, Asp, Glu, Gly, His, Ile, Lys, Leu, Met, Asn, Pro, Gln, Arg, Ser, Thr, Val or Tyr
  MOD_RES (10)...(10): Xaa = Ala, Asp, Glu, Phe, Gly, His, Lys, Leu, Asn, Gln, Arg, Ser, Thr or Tyr
  MOD_RES (11)...(11): Xaa = Ala, Phe, Gly, His, Gln, Ser, Thr or Val
  MOD_RES (12)...(12): Xaa = Ala, Asp, Glu, Phe, His, Ile, Lys, Leu, Met, Asn, Gln, Arg, Ser, Thr or Val
  MOD_RES (14)...(14): Xaa = Ala, Asp, Glu, Phe, Gly, His, Ile, Lys, Leu, Met, Asn, Gln, Arg, Ser, Thr, Val, Trp or Tyr
  MOD_RES (15)...(15): Xaa = Ala, Asp, Glu, Lys, Leu, Asn, Pro, Gln, Arg, Ser, Thr or Val
  MOD_RES (16)...(16): Xaa = Ala, Cys, Asp, Glu, Phe, Gly, His, Ile, Lys, Leu, Met, Asn, Pro, Gln, Arg, Ser, Thr, Val or Tyr
  MOD_RES (17)...(17): Xaa = Ala, Asp, Glu, Phe, Gly, His, Ile, Lys, Leu, Met, Asn, Pro, Gln, Arg, Ser, Thr, Val, Trp or Tyr
  MOD_RES (18)...(18): Xaa = Ala, Asp, Glu, Phe, Gly, His, Ile, Lys, Leu, Asn, Pro, Gln, Arg, Ser, Thr, Val or Trp
  MOD_RES (19)...(19): Xaa = Ala, Asp, Glu, Gly, His, Lys, Leu, Met, Asn, Gln, Arg, Ser, Thr, Val, Trp or Tyr
  MOD_RES (20)...(20): Xaa = Ala, Phe, His, Ile, Leu, Pro, Arg, Thr, Val or Tyr
  MOD_RES (21)...(21): Xaa = Ala, Asp, Glu, Phe, His, Ile, Lys, Leu, Met, Asn, Gln, Arg, Ser, Thr, Val, Trp or Tyr
  MOD_RES (23)...(23): Xaa = Ala, Asp, Glu, Phe, Gly, His, Ile, Lys, Leu, Met, Asn, Pro, Gln, Arg, Ser, Thr, Val, Trp or Tyr
  MOD_RES (25)...(25): Xaa = Ala, Asp, Glu, Phe, Gly, His, Ile, Lys, Leu, Asn, Pro, Gln, Arg, Ser, Thr, Val or Tyr
  MOD_RES (26)...(26): Xaa = Ala, Asp, Glu, Phe, His, Ile, Lys, Leu, Met, Asn, Pro, Gln, Arg, Ser, Thr or Val
  MOD_RES (27)...(27): Xaa = Asp, Glu, Gly, Asn, Pro or Ser
  MOD_RES (28)...(28): Xaa = Ala, Asp, Glu, Phe, His, Leu, Met, Gln, Arg, Ser, Thr, Trp or Tyr
  MOD_RES (29)...(29): Xaa = Ala, Asp, Glu, Phe, Gly, His, Ile, Lys, Leu, Met, Asn, Gln, Arg, Ser, Thr, Val or Tyr
  MOD_RES (30)...(30): Xaa = Ala, Phe, Gly, Ile, Lys, Leu, Met, Pro, Gln, Arg, Ser, Thr, Val, Trp or Tyr
  MOD_RES (31)...(31): Xaa = Ala, Asp, Glu, Phe, Gly, His, Lys, Leu, Met, Asn, Pro, Gln, Arg, Ser, Thr, Val or Trp
  MOD_RES (32)...(32): Xaa = Ala, Asp, Glu, Gly, Ile, Lys, Leu, Met, Asn, Pro, Gln, Arg, Ser, Thr, Val or Tyr
  MOD_RES (33)...(33): Xaa = Ala, Asp, Glu, Phe, Gly, His, Ile, Lys, Leu, Met, Asn, Gln, Ser, Thr or Val
  MOD_RES (34)...(34): Xaa = Glu, Phe, Gly, His, Ile, Lys, Leu, Met, Asn, Pro, Gln, Arg, Ser, Thr or Trp
  MOD_RES (35)...(35): Xaa = Ala, Asp, Glu, Phe, Gly, His, Lys, Leu, Met, Asn, Pro, Gln, Arg, Ser, Thr, Val or Tyr
  MOD_RES (36)...(36): Xaa = Ala, Asp, Glu, Phe, Gly, His, Ile, Lys, Met, Asn, Gln, Arg, Ser, Thr, Val or Tyr
CXXXXXCXXXXXCXXXXXXXXCXCXXXXXXXXXXXXC

SEQ ID NO: 279 - protein, 34 aa, Artificial Sequence
  EGF domain monomer sequence
  MOD_RES (2)...(2): Xaa = Ala, Asp, Glu, Phe, Gly, Ile, Lys, Leu, Met, Asn, Pro, Gln, Arg, Ser, Thr, Val or Tyr
  MOD_RES (3)...(3): Xaa = Ala, Asp, Glu, Phe, Gly, His, Ile, Lys, Leu, Met, Asn, Pro, Gln, Arg, Ser, Thr, Val or Tyr
  MOD_RES (4)...(4): Xaa = Ala, Asp, Glu, Phe, Gly, His, Ile, Lys, Leu, Met, Asn, Pro, Gln, Arg, Ser, Thr, Val or Trp
  MOD_RES (5)...(5): Xaa = Ala, Asp, Glu, Phe, Gly, His, Ile, Lys, Leu, Met, Asn, Pro, Gln, Arg, Ser, Thr or Val
  MOD_RES (6)...(6): Xaa = Ala, Asp, Glu, Phe, Gly, His, Ile, Lys, Leu, Asn, Pro, Gln, Arg, Ser, Val or Tyr
  MOD_RES (7)...(7): Xaa = Ala, Asp, Glu, Gly, Ile, Lys, Leu, Met, Asn, Pro, Gln, Arg, Ser, Thr, Val or Tyr
  MOD_RES (9)...(9): Xaa = Ala, Cys, Asp, Glu, Phe, Gly, His, Lys, Leu, Met, Asn, Pro, Gln, Arg, Ser, Val or Tyr
  MOD_RES (10)...(10): Xaa = Ala, Asp, Glu, Gly, His, Ile, Lys, Leu, Met, Asn, Pro, Gln, Arg, Ser, Thr, Val or Tyr
  MOD_RES (11)...(11): Xaa = Ala, Asp, Glu, Phe, Gly, His, Lys, Leu, Asn, Gln, Arg, Ser, Thr or Tyr
  MOD_RES (12)...(12): Xaa = Ala, Phe, Gly, His, Gln, Ser, Thr or Val
  MOD_RES (13)...(13): Xaa = Ala, Asp, Glu, Phe, His, Ile, Lys, Leu, Met, Asn, Gln, Arg, Ser, Thr or Val
  MOD_RES (15)...(15): Xaa = Ala, Asp, Glu, Phe, Gly, His, Ile, Lys, Leu, Met, Asn, Gln, Arg, Ser, Thr, Val, Trp or Tyr
  MOD_RES (16)...(16): Xaa = Ala, Asp, Glu, Lys, Leu, Asn, Pro, Gln, Arg, Ser, Thr or Val
  MOD_RES (17)...(17): Xaa = Ala, Cys, Asp, Glu, Phe, Gly, His, Ile, Lys, Leu, Met, Asn, Pro, Gln, Arg, Ser, Thr, Val or Tyr
  MOD_RES (18)...(18): Xaa = Ala, Asp, Glu, Phe, Gly, His, Ile, Lys, Leu, Met, Asn, Pro, Gln, Arg, Ser, Thr, Val, Trp or Tyr
  MOD_RES (19)...(19): Xaa = Ala, Asp, Glu, Phe, Gly, His, Ile, Lys, Leu, Asn, Pro, Gln, Arg, Ser, Thr, Val or Trp
  MOD_RES (20)...(20): Xaa = Ala, Asp, Glu, Gly, His, Lys, Leu, Met, Asn, Gln, Arg, Ser, Thr, Val, Trp or Tyr
  MOD_RES (21)...(21): Xaa = Ala, Phe, His, Ile, Leu, Pro, Arg, Thr, Val or Tyr
  MOD_RES (22)...(22): Xaa = Ala, Asp, Glu, Phe, His, Ile, Lys, Leu, Met, Asn, Gln, Arg, Ser, Thr, Val, Trp or Tyr
  MOD_RES (24)...(24): Xaa = Ala, Asp, Glu, Phe, Gly, His, Ile, Lys, Leu, Met, Asn, Pro, Gln, Arg, Ser, Thr, Val, Trp or Tyr
  MOD_RES (26)...(26): Xaa = Ala, Asp, Glu, Phe, His, Lys, Leu, Met, Asn, Pro, Gln, Arg, Ser, Thr, Val, Trp or Tyr
  MOD_RES (27)...(27): Xaa = Ala, Asp, Glu, Phe, Gly, His, Lys, Leu, Asn, Pro, Gln, Arg, Ser, Thr, Val or Tyr
  MOD_RES (28)...(28): Xaa = Ala, Glu, Gly, His, Lys, Leu, Asn, Pro, Arg, Ser, Thr or Tyr
  MOD_RES (29)...(29): Xaa = Phe, His, Ile, Leu, Met, Arg, Thr, Trp or Tyr
  MOD_RES (30)...(30): Xaa = Ala, Asp, Glu, Phe, Gly, His, Ile, Lys, Leu, Met, Asn, Gln, Arg, Ser, Thr, Val or Tyr
  MOD_RES (31)...(31): Xaa = Asp, Gly or Ser
  MOD_RES (32)...(32): Xaa = Ala, Asp, Glu, Phe, His, Ile, Lys, Leu, Asn, Pro, Gln, Arg, Ser, Thr, Val or Tyr
  MOD_RES (33)...(33): Xaa = Ala, Asp, Glu, Phe, His, Ile, Lys, Leu, Met, Asn, Gln, Arg, Ser, Thr or Tyr
CXXXXXXCXXXXXCXXXXXXXXCXCXXXXXXXXC

SEQ ID NO: 280 - protein, 35 aa, Artificial Sequence
  EGF domain monomer sequence
  MOD_RES (2)...(2): Xaa = Ala, Asp, Glu, Phe, Gly, Ile, Lys, Leu, Met, Asn, Pro, Gln, Arg, Ser, Thr, Val or Tyr
  MOD_RES (3)...(3): Xaa = Ala, Asp, Glu, Phe, Gly, His, Ile, Lys, Leu, Met, Asn, Pro, Gln, Arg, Ser, Thr, Val or Tyr
  MOD_RES (4)...(4): Xaa = Ala, Asp, Glu, Phe, Gly, His, Ile, Lys, Leu, Met, Asn, Pro, Gln, Arg, Ser, Thr, Val or Trp
  MOD_RES (5)...(5): Xaa = Ala, Asp, Glu, Phe, Gly, His, Ile, Lys, Leu, Met, Asn, Pro, Gln, Arg, Ser, Thr or Val
  MOD_RES (6)...(6): Xaa = Ala, Asp, Glu, Phe, Gly, His, Ile, Lys, Leu, Asn, Pro, Gln, Arg, Ser, Val or Tyr
  MOD_RES (7)...(7): Xaa = Ala, Asp, Glu, Gly, Ile, Lys, Leu, Met, Asn, Pro, Gln, Arg, Ser, Thr, Val or Tyr
  MOD_RES (9)...(9): Xaa = Ala, Cys, Asp, Glu, Phe, Gly, His, Lys, Leu, Met, Asn, Pro, Gln, Arg, Ser, Val or Tyr
  MOD_RES (10)...(10): Xaa = Ala, Asp, Glu, Gly, His, Ile, Lys, Leu, Met, Asn, Pro, Gln, Arg, Ser, Thr, Val or Tyr
  MOD_RES (11)...(11): Xaa = Ala, Asp, Glu, Phe, Gly, His, Lys, Leu, Asn, Gln, Arg, Ser, Thr or Tyr
  MOD_RES (12)...(12): Xaa = Ala, Phe, Gly, His, Gln, Ser, Thr or Val
  MOD_RES (13)...(13): Xaa = Ala, Asp, Glu, Phe, His, Ile, Lys, Leu, Met, Asn, Gln, Arg, Ser, Thr or Val
  MOD_RES (15)...(15): Xaa = Ala, Asp, Glu, Phe, Gly, His, Ile, Lys, Leu, Met, Asn, Gln, Arg, Ser, Thr, Val, Trp or Tyr
  MOD_RES (16)...(16): Xaa = Ala, Asp, Glu, Lys, Leu, Asn, Pro, Gln, Arg, Ser, Thr or Val
  MOD_RES (17)...(17): Xaa = Ala, Cys, Asp, Glu, Phe, Gly, His, Ile, Lys, Leu, Met, Asn, Pro, Gln, Arg, Ser, Thr, Val or Tyr
  MOD_RES (18)...(18): Xaa = Ala, Asp, Glu, Phe, Gly, His, Ile, Lys, Leu, Met, Asn, Pro, Gln, Arg, Ser, Thr, Val, Trp or Tyr
  MOD_RES (19)...(19): Xaa = Ala, Asp, Glu, Phe, Gly, His, Ile, Lys, Leu, Asn, Pro, Gln, Arg, Ser, Thr, Val or Trp
  MOD_RES (20)...(20): Xaa = Ala, Asp, Glu, Gly, His, Lys, Leu, Met, Asn, Gln, Arg, Ser, Thr, Val, Trp or Tyr
  MOD_RES (21)...(21): Xaa = Ala, Phe, His, Ile, Leu, Pro, Arg, Thr, Val or Tyr
  MOD_RES (22)...(22): Xaa = Ala, Asp, Glu, Phe, His, Ile, Lys, Leu, Met, Asn, Gln, Arg, Ser, Thr, Val, Trp or Tyr
  MOD_RES (24)...(24): Xaa = Ala, Asp, Glu, Phe, Gly, His, Ile, Lys, Leu, Met, Asn, Pro, Gln, Arg, Ser, Thr, Val, Trp or Tyr
  MOD_RES (26)...(26): Xaa = Ala, Asp, Glu, Phe, Gly, His, Ile, Lys, Leu, Asn, Pro, Gln, Arg, Ser, Thr, Val or Tyr
  MOD_RES (27)...(27): Xaa = Ala, Asp, Glu, Phe, His, Ile, Lys, Leu, Met, Asn, Pro, Gln, Arg, Ser, Thr or Val
  MOD_RES (28)...(28): Xaa = Asp, Glu, Gly, Asn, Pro or Ser
  MOD_RES (29)...(29): Xaa = Ala, Asp, Glu, Phe, His, Leu, Met, Gln, Arg, Ser, Thr, Trp or Tyr
  MOD_RES (30)...(30): Xaa = Ala, Asp, Glu, Phe, Gly, His, Ile, Lys, Leu, Met, Asn, Gln, Arg, Ser, Thr, Val or Tyr
  MOD_RES (31)...(31): Xaa = Ala, Phe, Gly, Ile, Lys, Leu, Met, Pro, Gln, Arg, Ser, Thr, Val, Trp or Tyr
  MOD_RES (32)...(32): Xaa = Ala, Asp, Glu, Phe, Gly, His, Lys, Leu, Met, Asn, Pro, Gln, Arg, Ser, Thr, Val or Trp
  MOD_RES (33)...(33): Xaa = Ala, Asp, Glu, Gly, Ile, Lys, Leu, Met, Asn, Pro, Gln, Arg, Ser, Thr, Val or Tyr
  MOD_RES (34)...(34): Xaa = Ala, Asp, Glu, Phe, Gly, His, Ile, Lys, Leu, Met, Asn, Gln, Ser, Thr or Val
CXXXXXXCXXXXXCXXXXXXXXCXCXXXXXXXXXC

SEQ ID NO: 281 - protein, 36 aa, Artificial Sequence
  EGF domain monomer sequence
  MOD_RES (2)...(2): Xaa = Ala, Asp, Glu, Phe, Gly, Ile, Lys, Leu, Met, Asn, Pro, Gln, Arg, Ser, Thr, Val or Tyr
  MOD_RES (3)...(3): Xaa = Ala, Asp, Glu, Phe, Gly, His, Ile, Lys, Leu, Met, Asn, Pro, Gln, Arg, Ser, Thr, Val or Tyr
  MOD_RES (4)...(4): Xaa = Ala, Asp, Glu, Phe, Gly, His, Ile, Lys, Leu, Met, Asn, Pro, Gln, Arg, Ser, Thr, Val or Trp
  MOD_RES (5)...(5): Xaa = Ala, Asp, Glu, Phe, Gly, His, Ile, Lys, Leu, Met, Asn, Pro, Gln, Arg, Ser, Thr or Val
  MOD_RES (6)...(6): Xaa = Ala, Asp, Glu, Phe, Gly, His, Ile, Lys, Leu, Asn, Pro, Gln, Arg, Ser, Val or Tyr
  MOD_RES (7)...(7): Xaa = Ala, Asp, Glu, Gly, Ile, Lys, Leu, Met, Asn, Pro, Gln, Arg, Ser, Thr, Val or Tyr
  MOD_RES (9)...(9): Xaa = Ala, Cys, Asp, Glu, Phe, Gly, His, Lys, Leu, Met, Asn, Pro, Gln, Arg, Ser, Val or Tyr
  MOD_RES (10)...(10): Xaa = Ala, Asp, Glu, Gly, His, Ile, Lys, Leu, Met, Asn, Pro, Gln, Arg, Ser, Thr, Val or Tyr
  MOD_RES (11)...(11): Xaa = Ala, Asp, Glu, Phe, Gly, His, Lys, Leu, Asn, Gln, Arg, Ser, Thr or Tyr
  MOD_RES (12)...(12): Xaa = Ala, Phe, Gly, His, Gln, Ser, Thr or Val
  MOD_RES (13)...(13): Xaa = Ala, Asp, Glu, Phe, His, Ile, Lys, Leu, Met, Asn, Gln, Arg, Ser, Thr or Val
  MOD_RES (15)...(15): Xaa = Ala, Asp, Glu, Phe, Gly, His, Ile, Lys, Leu, Met, Asn, Gln, Arg, Ser, Thr, Val, Trp or Tyr
  MOD_RES (16)...(16): Xaa = Ala, Asp, Glu, Lys, Leu, Asn, Pro, Gln, Arg, Ser, Thr or Val
  MOD_RES (17)...(17): Xaa = Ala, Cys, Asp, Glu, Phe, Gly, His, Ile, Lys, Leu, Met, Asn, Pro, Gln, Arg, Ser, Thr, Val or Tyr
  MOD_RES (18)...(18): Xaa = Ala, Asp, Glu, Phe, Gly, His, Ile, Lys, Leu, Met, Asn, Pro, Gln, Arg, Ser, Thr, Val, Trp or Tyr
  MOD_RES (19)...(19): Xaa = Ala, Asp, Glu, Phe, Gly, His, Ile, Lys, Leu, Asn, Pro, Gln, Arg, Ser, Thr, Val or Trp
  MOD_RES (20)...(20): Xaa = Ala, Asp, Glu, Gly, His, Lys, Leu, Met, Asn, Gln, Arg, Ser, Thr, Val, Trp or Tyr
  MOD_RES (21)...(21): Xaa = Ala, Phe, His, Ile, Leu, Pro, Arg, Thr, Val or Tyr
  MOD_RES (22)...(22): Xaa = Ala, Asp, Glu, Phe, His, Ile, Lys, Leu, Met, Asn, Gln, Arg, Ser, Thr, Val, Trp or Tyr
  MOD_RES (24)...(24): Xaa = Ala, Asp, Glu, Phe, Gly, His, Ile, Lys, Leu, Met, Asn, Pro, Gln, Arg, Ser, Thr, Val, Trp or Tyr
  MOD_RES (26)...(26): Xaa = Ala, Asp, Glu, Phe, Gly, His, Ile, Lys, Leu, Asn, Pro, Gln, Arg, Ser, Thr, Val or Tyr
  MOD_RES (27)...(27): Xaa = Ala, Asp, Glu, Phe, His, Ile, Lys, Leu, Met, Asn, Pro, Gln, Arg, Ser, Thr or Val
  MOD_RES (28)...(28): Xaa = Asp, Glu, Gly, Asn, Pro or Ser
  MOD_RES (29)...(29): Xaa = Ala, Asp, Glu, Phe, His, Leu, Met, Gln, Arg, Ser, Thr, Trp or Tyr
  MOD_RES (30)...(30): Xaa = Ala, Asp, Glu, Phe, Gly, His, Ile, Lys, Leu, Met, Asn, Gln, Arg, Ser, Thr, Val or Tyr
  MOD_RES (31)...(31): Xaa = Ala, Phe, Gly, Ile, Lys, Leu, Met, Pro, Gln, Arg, Ser, Thr, Val, Trp or Tyr
  MOD_RES (32)...(32): Xaa = Ala, Asp, Glu, Phe, Gly, His, Lys, Leu, Met, Asn, Pro, Gln, Arg, Ser, Thr, Val or Trp
  MOD_RES (33)...(33): Xaa = Ala, Asp, Glu, Gly, Ile, Lys, Leu, Met, Asn, Pro, Gln, Arg, Ser, Thr, Val or Tyr
  MOD_RES (34)...(34): Xaa = Ala, Asp, Glu, Phe, Gly, His, Ile, Lys, Leu, Met, Asn, Gln, Ser, Thr or Val
  MOD_RES (35)...(35): Xaa = Glu, Phe, Gly, His, Ile, Lys, Leu, Met, Asn, Pro, Gln, Arg, Ser, Thr or Trp
CXXXXXXCXXXXXCXXXXXXXXCXCXXXXXXXXXXC

SEQ ID NO: 282 - protein, 37 aa, Artificial Sequence
  EGF domain monomer sequence
  MOD_RES (2)...(2): Xaa = Ala, Asp, Glu, Phe, Gly, Ile, Lys, Leu, Met, Asn, Pro, Gln, Arg, Ser, Thr, Val or Tyr
  MOD_RES (3)...(3): Xaa = Ala, Asp, Glu, Phe, Gly, His, Ile, Lys, Leu, Met, Asn, Pro, Gln, Arg, Ser, Thr, Val or Tyr
  MOD_RES (4)...(4): Xaa = Ala, Asp, Glu, Phe, Gly, His, Ile, Lys, Leu, Met, Asn, Pro, Gln, Arg, Ser, Thr, Val or Trp
  MOD_RES (5)...(5): Xaa = Ala, Asp, Glu, Phe, Gly, His, Ile, Lys, Leu, Met, Asn, Pro, Gln, Arg, Ser, Thr or Val
  MOD_RES (6)...(6): Xaa = Ala, Asp, Glu, Phe, Gly, His, Ile, Lys, Leu, Asn, Pro, Gln, Arg, Ser, Val or Tyr
  MOD_RES (7)...(7): Xaa = Ala, Asp, Glu, Gly, Ile, Lys, Leu, Met, Asn, Pro, Gln, Arg, Ser, Thr, Val or Tyr
  MOD_RES (9)...(9): Xaa = Ala, Cys, Asp, Glu, Phe, Gly, His, Lys, Leu, Met, Asn, Pro, Gln, Arg, Ser, Val or Tyr
  MOD_RES (10)...(10): Xaa = Ala, Asp, Glu, Gly, His, Ile, Lys, Leu, Met, Asn, Pro, Gln, Arg, Ser, Thr, Val or Tyr
  MOD_RES (11)...(11): Xaa = Ala, Asp, Glu, Phe, Gly, His, Lys, Leu, Asn, Gln, Arg, Ser, Thr or Tyr
  MOD_RES (12)...(12): Xaa = Ala, Phe, Gly, His, Gln, Ser, Thr or Val
  MOD_RES (13)...(13): Xaa = Ala, Asp, Glu, Phe, His, Ile, Lys, Leu, Met, Asn, Gln, Arg, Ser, Thr or Val
  MOD_RES (15)...(15): Xaa = Ala, Asp, Glu, Phe, Gly, His, Ile, Lys, Leu, Met, Asn, Gln, Arg, Ser, Thr, Val, Trp or Tyr
  MOD_RES (16)...(16): Xaa = Ala, Asp, Glu, Lys, Leu, Asn, Pro, Gln, Arg, Ser, Thr or Val
  MOD_RES (17)...(17): Xaa = Ala, Cys, Asp, Glu, Phe, Gly, His, Ile, Lys, Leu, Met, Asn, Pro, Gln, Arg, Ser, Thr, Val or Tyr
  MOD_RES (18)...(18): Xaa = Ala, Asp, Glu, Phe, Gly, His, Ile, Lys, Leu, Met, Asn, Pro, Gln, Arg, Ser, Thr, Val, Trp or Tyr
  MOD_RES (19)...(19): Xaa = Ala, Asp, Glu, Phe, Gly, His, Ile, Lys, Leu, Asn, Pro, Gln, Arg, Ser, Thr, Val or Trp
  MOD_RES (20)...(20): Xaa = Ala, Asp, Glu, Gly, His, Lys, Leu, Met, Asn, Gln, Arg, Ser, Thr, Val, Trp or Tyr
  MOD_RES (21)...(21): Xaa = Ala, Phe, His, Ile, Leu, Pro, Arg, Thr, Val or Tyr
  MOD_RES (22)...(22): Xaa = Ala, Asp, Glu, Phe, His, Ile, Lys, Leu, Met, Asn, Gln, Arg, Ser, Thr, Val, Trp or Tyr
  MOD_RES (24)...(24): Xaa = Ala, Asp, Glu, Phe, Gly, His, Ile, Lys, Leu, Met, Asn, Pro, Gln, Arg, Ser, Thr, Val, Trp or Tyr
  MOD_RES (26)...(26): Xaa = Ala, Asp, Glu, Phe, Gly, His, Ile, Lys, Leu, Asn, Pro, Gln, Arg, Ser, Thr, Val or Tyr
  MOD_RES (27)...(27): Xaa = Ala, Asp, Glu, Phe, His, Ile, Lys, Leu, Met, Asn, Pro, Gln, Arg, Ser, Thr or Val
  MOD_RES (28)...(28): Xaa = Asp, Glu, Gly, Asn, Pro or Ser
  MOD_RES (29)...(29): Xaa = Ala, Asp, Glu, Phe, His, Leu, Met, Gln, Arg, Ser, Thr, Trp or Tyr
  MOD_RES (30)...(30): Xaa = Ala, Asp, Glu, Phe, Gly, His, Ile, Lys, Leu, Met, Asn, Gln, Arg, Ser, Thr, Val or Tyr
  MOD_RES (31)...(31): Xaa = Ala, Phe, Gly, Ile, Lys, Leu, Met, Pro, Gln, Arg, Ser, Thr, Val, Trp or Tyr
  MOD_RES (32)...(32): Xaa = Ala, Asp, Glu, Phe, Gly, His, Lys, Leu, Met, Asn, Pro, Gln, Arg, Ser, Thr, Val or Trp
  MOD_RES (33)...(33): Xaa = Ala, Asp, Glu, Gly, Ile, Lys, Leu, Met, Asn, Pro, Gln, Arg, Ser, Thr, Val or Tyr
  MOD_RES (34)...(34): Xaa = Ala, Asp, Glu, Phe, Gly, His, Ile, Lys, Leu, Met, Asn, Gln, Ser, Thr or Val
  MOD_RES (35)...(35): Xaa = Glu, Phe, Gly, His, Ile, Lys, Leu, Met, Asn, Pro, Gln, Arg, Ser, Thr or Trp
  MOD_RES (36)...(36): Xaa = Ala, Asp, Glu, Phe, Gly, His, Lys, Leu, Met, Asn, Pro, Gln, Arg, Ser, Thr, Val or Tyr
CXXXXXXCXXXXXCXXXXXXXXCXCXXXXXXXXXXXC

SEQ ID NO: 283 - protein, 38 aa, Artificial Sequence
  EGF domain monomer sequence
  MOD_RES (2)...(2): Xaa = Ala, Asp, Glu, Phe, Gly, Ile, Lys, Leu, Met, Asn, Pro, Gln, Arg, Ser, Thr, Val or Tyr
  MOD_RES (3)...(3): Xaa = Ala, Asp, Glu, Phe, Gly, His, Ile, Lys, Leu, Met, Asn, Pro, Gln, Arg, Ser, Thr, Val or Tyr
  MOD_RES (4)...(4): Xaa = Ala, Asp, Glu, Phe, Gly, His, Ile, Lys, Leu, Met, Asn, Pro, Gln, Arg, Ser, Thr, Val or Trp
  MOD_RES (5)...(5): Xaa = Ala, Asp, Glu, Phe, Gly, His, Ile, Lys, Leu, Met, Asn, Pro, Gln, Arg, Ser, Thr or Val
  MOD_RES (6)...(6): Xaa = Ala, Asp, Glu, Phe, Gly, His, Ile, Lys, Leu, Asn, Pro, Gln, Arg, Ser, Val or Tyr
  MOD_RES (7)...(7): Xaa = Ala, Asp, Glu, Gly, Ile, Lys, Leu, Met, Asn, Pro, Gln, Arg, Ser, Thr, Val or Tyr
  MOD_RES (9)...(9): Xaa = Ala, Cys, Asp, Glu, Phe, Gly, His, Lys, Leu, Met, Asn, Pro, Gln, Arg, Ser, Val or Tyr
  MOD_RES (10)...(10): Xaa = Ala, Asp, Glu, Gly, His, Ile, Lys, Leu, Met, Asn, Pro, Gln, Arg, Ser, Thr, Val or Tyr
  MOD_RES (11)...(11): Xaa = Ala, Asp, Glu, Phe, Gly, His, Lys, Leu, Asn, Gln, Arg, Ser, Thr or Tyr
  MOD_RES (12)...(12): Xaa = Ala, Phe, Gly, His, Gln, Ser, Thr or Val
  MOD_RES (13)...(13): Xaa = Ala, Asp, Glu, Phe, His, Ile, Lys, Leu, Met, Asn, Gln, Arg, Ser, Thr or Val
  MOD_RES (15)...(15): Xaa = Ala, Asp, Glu, Phe, Gly, His, Ile, Lys, Leu, Met, Asn, Gln, Arg, Ser, Thr, Val, Trp or Tyr
  MOD_RES (16)...(16): Xaa = Ala, Asp, Glu, Lys, Leu, Asn, Pro, Gln, Arg, Ser, Thr or Val
  MOD_RES (17)...(17): Xaa = Ala, Cys, Asp, Glu, Phe, Gly, His, Ile, Lys, Leu, Met, Asn, Pro, Gln, Arg, Ser, Thr, Val or Tyr
  MOD_RES (18)...(18): Xaa = Ala, Asp, Glu, Phe, Gly, His, Ile, Lys, Leu, Met, Asn, Pro, Gln, Arg, Ser, Thr, Val, Trp or Tyr
  MOD_RES (19)...(19): Xaa = Ala, Asp, Glu, Phe, Gly, His, Ile, Lys, Leu, Asn, Pro, Gln, Arg, Ser, Thr, Val or Trp
  MOD_RES (20)...(20): Xaa = Ala, Asp, Glu, Gly, His, Lys, Leu, Met, Asn, Gln, Arg, Ser, Thr, Val, Trp or Tyr
  MOD_RES (21)...(21): Xaa = Ala, Phe, His, Ile, Leu, Pro, Arg, Thr, Val or Tyr
  MOD_RES (22)...(22): Xaa = Ala, Asp, Glu, Phe, His, Ile, Lys, Leu, Met, Asn, Gln, Arg, Ser, Thr, Val, Trp or Tyr
  MOD_RES (24)...(24): Xaa = Ala, Asp, Glu, Phe, Gly, His, Ile, Lys, Leu, Met, Asn, Pro, Gln, Arg, Ser, Thr, Val, Trp or Tyr
  MOD_RES (26)...(26): Xaa = Ala, Asp, Glu, Phe, Gly, His, Ile, Lys, Leu, Asn, Pro, Gln, Arg, Ser, Thr, Val or Tyr
  MOD_RES (27)...(27): Xaa = Ala, Asp, Glu, Phe, His, Ile, Lys, Leu, Met, Asn, Pro, Gln, Arg, Ser, Thr or Val
  MOD_RES (28)...(28): Xaa = Asp, Glu, Gly, Asn, Pro or Ser
  MOD_RES (29)...(29): Xaa = Ala, Asp, Glu, Phe, His, Leu, Met, Gln, Arg, Ser, Thr, Trp or Tyr
  MOD_RES (30)...(30): Xaa = Ala, Asp, Glu, Phe, Gly, His, Ile, Lys, Leu, Met, Asn, Gln, Arg, Ser, Thr, Val or Tyr
  MOD_RES (31)...(31): Xaa = Ala, Phe, Gly, Ile, Lys, Leu, Met, Pro, Gln, Arg, Ser, Thr, Val, Trp or Tyr
  MOD_RES (32)...(32): Xaa = Ala, Asp, Glu, Phe, Gly, His, Lys, Leu, Met, Asn, Pro, Gln, Arg, Ser, Thr, Val or Trp
  MOD_RES (33)...(33): Xaa = Ala, Asp, Glu, Gly, Ile, Lys, Leu, Met, Asn, Pro, Gln, Arg, Ser, Thr, Val or Tyr
  MOD_RES (34)...(34): Xaa = Ala, Asp, Glu, Phe, Gly, His, Ile, Lys, Leu, Met, Asn, Gln, Ser, Thr or Val
  MOD_RES (35)...(35): Xaa = Glu, Phe, Gly, His, Ile, Lys, Leu, Met, Asn, Pro, Gln, Arg, Ser, Thr or Trp
  MOD_RES (36)...(36): Xaa = Ala, Asp, Glu, Phe, Gly, His, Lys, Leu, Met, Asn, Pro, Gln, Arg, Ser, Thr, Val or Tyr
  MOD_RES (37)...(37): Xaa = Ala, Asp, Glu, Phe, Gly, His, Ile, Lys, Met, Asn, Gln, Arg, Ser, Thr, Val or Tyr
CXXXXXXCXXXXXCXXXXXXXXCXCXXXXXXXXXXXXC

SEQ ID NO: 284 - protein, 32 aa, Artificial Sequence
  EGF domain monomer sequence
  MOD_RES (2)...(2): Xaa = Ala, Asp, Glu, Gly, Ile, Lys, Leu, Gln, Arg, Ser, Thr or Val
  MOD_RES (3)...(3): Xaa = Ala, Asp, Glu, Phe, Gly, His, Ile, Lys, Leu, Met, Asn, Pro, Gln, Arg, Ser, Thr or Val
  MOD_RES (4)...(4): Xaa = Ala, Glu, Phe, Gly, His, Leu, Asn, Pro, Gln, Arg, Ser, Thr, Trp or Tyr
  MOD_RES (5)...(5): Xaa = Ala, Asp, Glu, Phe, Gly, His, Ile, Lys, Leu, Asn, Pro, Arg, Ser or Thr
  MOD_RES (6)...(6): Xaa = Ala, Phe, Gly, Ile, Lys, Leu, Met, Asn, Pro, Gln, Arg, Ser, Thr, Val or Tyr
  MOD_RES (8)...(8): Xaa = Ala, Asp, Glu, Gly, His, Lys, Asn, Pro, Gln, Ser, Thr or Val
  MOD_RES (9)...(9): Xaa = Phe, Gly, His, Leu, Asn, Gln, Ser, Thr or Tyr
  MOD_RES (10)...(10): Xaa = Ala, Asp, Glu, Phe, Gly, His, Ile, Lys, Leu, Asn, Gln, Arg, Ser, Thr, Val or Tyr
  MOD_RES (12)...(12): Xaa = Ala, Asp, Phe, His, Ile, Lys, Leu, Met, Asn, Gln, Arg, Ser, Thr, Val or Tyr
  MOD_RES (13)...(13): Xaa = Ala, Asp, Glu, Phe, His, Leu, Met, Asn, Pro, Gln, Arg, Ser, Val or Tyr
  MOD_RES (14)...(14): Xaa = Ala, Asp, Glu, Phe, Gly, His, Leu, Asn, Arg, Ser, Thr, Val or Tyr
  MOD_RES (15)...(15): Xaa = Ala, Asp, Glu, Gly, Asn, Pro, Gln, Arg, Ser or Thr
  MOD_RES (16)...(16): Xaa = Ala, Asp, Glu, Phe, Gly, Lys, Leu, Asn, Pro, Gln, Arg, Ser or Thr
  MOD_RES (17)...(17): Xaa = Ala, Asp, Glu, Gly, Met, Asn, Arg, Ser, Thr, Val or Tyr
  MOD_RES (18)...(18): Xaa = Ala, Asp, Glu, Gly, Lys, Leu, Met, Gln, Arg, Ser or Thr
  MOD_RES (19)...(19): Xaa = Phe, His, Ile, Pro, Arg, Val, Trp or Tyr
  MOD_RES (20)...(20): Xaa = Ala, Glu, His, Lys, Leu, Gln, Ser, Thr, Val or Tyr
  MOD_RES (22)...(22): Xaa = Ala, Asp, Glu, Phe, Gly, His, Ile, Lys, Leu, Met, Asn, Pro, Gln, Arg, Ser, Thr, Val, Trp or Tyr
  MOD_RES (24)...(24): Xaa = Ala, Asp, Glu, Phe, His, Lys, Leu, Met, Asn, Pro, Gln, Arg, Ser, Thr, Val, Trp or Tyr
  MOD_RES (25)...(25): Xaa = Ala, Asp, Glu, Phe, Gly, His, Lys, Leu, Asn, Pro, Gln, Arg, Ser, Thr, Val or Tyr
  MOD_RES (26)...(26): Xaa = Ala, Glu, Gly, His, Lys, Leu, Asn, Pro, Arg, Ser, Thr or Tyr
  MOD_RES (27)...(27): Xaa = Phe, His, Ile, Leu, Met, Arg, Thr, Trp or Tyr
  MOD_RES (28)...(28): Xaa = Ala, Asp, Glu, Phe, Gly, His, Ile, Lys, Leu, Met, Asn, Gln, Arg, Ser, Thr, Val or Tyr
  MOD_RES (29)...(29): Xaa = Asp, Gly or Ser
  MOD_RES (30)...(30): Xaa = Ala, Asp, Glu, Phe, His, Ile, Lys, Leu, Asn, Pro, Gln, Arg, Ser, Thr, Val or Tyr
  MOD_RES (31)...(31): Xaa = Ala, Asp, Glu, Phe, His, Ile, Lys, Leu, Met, Asn, Gln, Arg, Ser, Thr or Tyr
CXXXXXCXXXCXXXXXXXXXCXCXXXXXXXXC

SEQ ID NO: 285 - protein, 33 aa, Artificial Sequence
  EGF domain monomer sequence
  MOD_RES (2)...(2): Xaa = Ala, Asp, Glu, Gly, Ile, Lys, Leu, Gln, Arg, Ser, Thr or Val
  MOD_RES (3)...(3): Xaa = Ala, Asp, Glu, Phe, Gly, His, Ile, Lys, Leu, Met, Asn, Pro, Gln, Arg, Ser, Thr or Val
  MOD_RES (4)...(4): Xaa = Ala, Glu, Phe, Gly, His, Leu, Asn, Pro, Gln, Arg, Ser, Thr, Trp or Tyr
  MOD_RES (5)...(5): Xaa = Ala, Asp, Glu, Phe, Gly, His, Ile, Lys, Leu, Asn, Pro, Arg, Ser or Thr
  MOD_RES (6)...(6): Xaa = Ala, Phe, Gly, Ile, Lys, Leu, Met, Asn, Pro, Gln, Arg, Ser, Thr, Val or Tyr
  MOD_RES (8)...(8): Xaa = Ala, Asp, Glu, Gly, His, Lys, Asn, Pro, Gln, Ser, Thr or Val
  MOD_RES (9)...(9): Xaa = Phe, Gly, His, Leu, Asn, Gln, Ser, Thr or Tyr
  MOD_RES (10)...(10): Xaa = Ala, Asp, Glu, Phe, Gly, His, Ile, Lys, Leu, Asn, Gln, Arg, Ser, Thr, Val or Tyr
  MOD_RES (12)...(12): Xaa = Ala, Asp, Phe, His, Ile, Lys, Leu, Met, Asn, Gln, Arg, Ser, Thr, Val or Tyr
  MOD_RES (13)...(13): Xaa = Ala, Asp, Glu, Phe, His, Leu, Met, Asn, Pro, Gln, Arg, Ser, Val or Tyr
  MOD_RES (14)...(14): Xaa = Ala, Asp, Glu, Phe, Gly, His, Leu, Asn, Arg, Ser, Thr, Val or Tyr
  MOD_RES (15)...(15): Xaa = Ala, Asp, Glu, Gly, Asn, Pro, Gln, Arg, Ser or Thr
  MOD_RES (16)...(16): Xaa = Ala, Asp, Glu, Phe, Gly, Lys, Leu, Asn, Pro, Gln, Arg, Ser or Thr
  MOD_RES (17)...(17): Xaa = Ala, Asp, Glu, Gly, Met, Asn, Arg, Ser, Thr, Val or Tyr
  MOD_RES (18)...(18): Xaa = Ala, Asp, Glu, Gly, Lys, Leu, Met, Gln, Arg, Ser or Thr
  MOD_RES (19)...(19): Xaa = Phe, His, Ile, Pro, Arg, Val, Trp or Tyr
  MOD_RES (20)...(20): Xaa = Ala, Glu, His, Lys, Leu, Gln, Ser, Thr, Val or Tyr
  MOD_RES (22)...(22): Xaa = Ala, Asp, Glu, Phe, Gly, His, Ile, Lys, Leu, Met, Asn, Pro, Gln, Arg, Ser, Thr, Val, Trp or Tyr
  MOD_RES (24)...(24): Xaa = Ala, Asp, Glu, Phe, Gly, His, Ile, Lys, Leu, Asn, Pro, Gln, Arg, Ser, Thr, Val or Tyr
  MOD_RES (25)...(25): Xaa = Ala, Asp, Glu, Phe, His, Ile, Lys, Leu, Met, Asn, Pro, Gln, Arg, Ser, Thr or Val
  MOD_RES (26)...(26): Xaa = Asp, Glu, Gly, Asn, Pro or Ser
  MOD_RES (27)...(27): Xaa = Ala, Asp, Glu, Phe, His, Leu, Met, Gln, Arg, Ser, Thr, Trp or Tyr
  MOD_RES (28)...(28): Xaa = Ala, Asp, Glu, Phe, Gly, His, Ile, Lys, Leu, Met, Asn, Gln, Arg, Ser, Thr, Val or Tyr
  MOD_RES (29)...(29): Xaa = Ala, Phe, Gly, Ile, Lys, Leu, Met, Pro, Gln, Arg, Ser, Thr, Val, Trp or Tyr
  MOD_RES (30)...(30): Xaa = Ala, Asp, Glu, Phe, Gly, His, Lys, Leu, Met, Asn, Pro, Gln, Arg, Ser, Thr, Val or Trp
  MOD_RES (31)...(31): Xaa = Ala, Asp, Glu, Gly, Ile, Lys, Leu, Met, Asn, Pro, Gln, Arg, Ser, Thr, Val or Tyr
  MOD_RES (32)...(32): Xaa = Ala, Asp, Glu, Phe, Gly, His, Ile, Lys, Leu, Met, Asn, Gln, Ser, Thr or Val
CXXXXXCXXXCXXXXXXXXXCXCXXXXXXXXXC

SEQ ID NO: 286 - protein, 34 aa, Artificial Sequence
  EGF domain monomer sequence
  MOD_RES (2)...(2): Xaa = Ala, Asp, Glu, Gly, Ile, Lys, Leu, Gln, Arg, Ser, Thr or Val
  MOD_RES (3)...(3): Xaa = Ala, Asp, Glu, Phe, Gly, His, Ile, Lys, Leu, Met, Asn, Pro, Gln, Arg, Ser, Thr or Val
  MOD_RES (4)...(4): Xaa = Ala, Glu, Phe, Gly, His, Leu, Asn, Pro, Gln, Arg, Ser, Thr, Trp or Tyr
  MOD_RES (5)...(5): Xaa = Ala, Asp, Glu, Phe, Gly, His, Ile, Lys, Leu, Asn, Pro, Arg, Ser or Thr
  MOD_RES (6)...(6): Xaa = Ala, Phe, Gly, Ile, Lys, Leu, Met, Asn, Pro, Gln, Arg, Ser, Thr, Val or Tyr
  MOD_RES (8)...(8): Xaa = Ala, Asp, Glu, Gly, His, Lys, Asn, Pro, Gln, Ser, Thr or Val
  MOD_RES (9)...(9): Xaa = Phe, Gly, His, Leu, Asn, Gln, Ser, Thr or Tyr
  MOD_RES (10)...(10): Xaa = Ala, Asp, Glu, Phe, Gly, His, Ile, Lys, Leu, Asn, Gln, Arg, Ser, Thr, Val or Tyr
  MOD_RES (12)...(12): Xaa = Ala, Asp, Phe, His, Ile, Lys, Leu, Met, Asn, Gln, Arg, Ser, Thr, Val or Tyr
  MOD_RES (13)...(13): Xaa = Ala, Asp, Glu, Phe, His, Leu, Met, Asn, Pro, Gln, Arg, Ser, Val or Tyr
  MOD_RES (14)...(14): Xaa = Ala, Asp, Glu, Phe, Gly, His, Leu, Asn, Arg, Ser, Thr, Val or Tyr
  MOD_RES (15)...(15): Xaa = Ala, Asp, Glu, Gly, Asn, Pro, Gln, Arg, Ser or Thr
  MOD_RES (16)...(16): Xaa = Ala, Asp, Glu, Phe, Gly, Lys, Leu, Asn, Pro, Gln, Arg, Ser or Thr
  MOD_RES (17)...(17): Xaa = Ala, Asp, Glu, Gly, Met, Asn, Arg, Ser, Thr, Val or Tyr
  MOD_RES (18)...(18): Xaa = Ala, Asp, Glu, Gly, Lys, Leu, Met, Gln, Arg, Ser or Thr
  MOD_RES (19)...(19): Xaa = Phe, His, Ile, Pro, Arg, Val, Trp or Tyr
  MOD_RES (20)...(20): Xaa = Ala, Glu, His, Lys, Leu, Gln, Ser, Thr, Val or Tyr
  MOD_RES (22)...(22): Xaa = Ala, Asp, Glu, Phe, Gly, His, Ile, Lys, Leu, Met, Asn, Pro, Gln, Arg, Ser, Thr, Val, Trp or Tyr
  MOD_RES (24)...(24): Xaa = Ala, Asp, Glu, Phe, Gly, His, Ile, Lys, Leu, Asn, Pro, Gln, Arg, Ser, Thr, Val or Tyr
  MOD_RES (25)...(25): Xaa = Ala, Asp, Glu, Phe, His, Ile, Lys, Leu, Met, Asn, Pro, Gln, Arg, Ser, Thr or Val
  MOD_RES (26)...(26): Xaa = Asp, Glu, Gly, Asn, Pro or Ser
  MOD_RES (27)...(27): Xaa = Ala, Asp, Glu, Phe, His, Leu, Met, Gln, Arg, Ser, Thr, Trp or Tyr
  MOD_RES (28)...(28): Xaa = Ala, Asp, Glu, Phe, Gly, His, Ile, Lys, Leu, Met, Asn, Gln, Arg, Ser, Thr, Val or Tyr
  MOD_RES (29)...(29): Xaa = Ala, Phe, Gly, Ile, Lys, Leu, Met, Pro, Gln, Arg, Ser, Thr, Val, Trp or Tyr
  MOD_RES (30)...(30): Xaa = Ala, Asp, Glu, Phe, Gly, His, Lys, Leu, Met, Asn, Pro, Gln, Arg, Ser, Thr, Val or Trp
  MOD_RES (31)...(31): Xaa = Ala, Asp, Glu, Gly, Ile, Lys, Leu, Met, Asn, Pro, Gln, Arg, Ser, Thr, Val or Tyr
  MOD_RES (32)...(32): Xaa = Ala, Asp, Glu, Phe, Gly, His, Ile, Lys, Leu, Met, Asn, Gln, Ser, Thr or Val
  MOD_RES (33)...(33): Xaa = Glu, Phe, Gly, His, Ile, Lys, Leu, Met, Asn, Pro, Gln, Arg, Ser, Thr or Trp
CXXXXXCXXXCXXXXXXXXXCXCXXXXXXXXXXC

SEQ ID NO: 287 - protein, 35 aa, Artificial Sequence
  EGF domain monomer sequence
  MOD_RES (2)...(2): Xaa = Ala, Asp, Glu, Gly, Ile, Lys, Leu, Gln, Arg, Ser, Thr or Val
  MOD_RES (3)...(3): Xaa = Ala, Asp, Glu, Phe, Gly, His, Ile, Lys, Leu, Met, Asn, Pro, Gln, Arg, Ser, Thr or Val
  MOD_RES (4)...(4): Xaa = Ala, Glu, Phe, Gly, His, Leu, Asn, Pro, Gln, Arg, Ser, Thr, Trp or Tyr
  MOD_RES (5)...(5): Xaa = Ala, Asp, Glu, Phe, Gly, His, Ile, Lys, Leu, Asn, Pro, Arg, Ser or Thr
  MOD_RES (6)...(6): Xaa = Ala, Phe, Gly, Ile, Lys, Leu, Met, Asn, Pro, Gln, Arg, Ser, Thr, Val or Tyr
  MOD_RES (8)...(8): Xaa = Ala, Asp, Glu, Gly, His, Lys, Asn, Pro, Gln, Ser, Thr or Val
  MOD_RES (9)...(9): Xaa = Phe, Gly, His, Leu, Asn, Gln, Ser, Thr or Tyr
  MOD_RES (10)...(10): Xaa = Ala, Asp, Glu, Phe, Gly, His, Ile, Lys, Leu, Asn, Gln, Arg, Ser, Thr, Val or Tyr
  MOD_RES (12)...(12): Xaa = Ala, Asp, Phe, His, Ile, Lys, Leu, Met, Asn, Gln, Arg, Ser, Thr, Val or Tyr
  MOD_RES (13)...(13): Xaa = Ala, Asp, Glu, Phe, His, Leu, Met, Asn, Pro, Gln, Arg, Ser, Val or Tyr
  MOD_RES (14)...(14): Xaa = Ala, Asp, Glu, Phe, Gly, His, Leu, Asn, Arg, Ser, Thr, Val or Tyr
  MOD_RES (15)...(15): Xaa = Ala, Asp, Glu, Gly, Asn, Pro, Gln, Arg, Ser or Thr
  MOD_RES (16)...(16): Xaa = Ala, Asp, Glu, Phe, Gly, Lys, Leu, Asn, Pro, Gln, Arg, Ser or Thr
  MOD_RES (17)...(17): Xaa = Ala, Asp, Glu, Gly, Met, Asn, Arg, Ser, Thr, Val or Tyr
  MOD_RES (18)...(18): Xaa = Ala, Asp, Glu, Gly, Lys, Leu, Met, Gln, Arg, Ser or Thr
  MOD_RES (19)...(19): Xaa = Phe, His, Ile, Pro, Arg, Val, Trp or Tyr
  MOD_RES (20)...(20): Xaa = Ala, Glu, His, Lys, Leu, Gln, Ser, Thr, Val or Tyr
  MOD_RES (22)...(22): Xaa = Ala, Asp, Glu, Phe, Gly, His, Ile, Lys, Leu, Met, Asn, Pro, Gln, Arg, Ser, Thr, Val, Trp or Tyr
  MOD_RES (24)...(24): Xaa = Ala, Asp, Glu, Phe, Gly, His, Ile, Lys, Leu, Asn, Pro, Gln, Arg, Ser, Thr, Val or Tyr
  MOD_RES (25)...(25): Xaa = Ala, Asp, Glu, Phe, His, Ile, Lys, Leu, Met, Asn, Pro, Gln, Arg, Ser, Thr or Val
  MOD_RES (26)...(26): Xaa = Asp, Glu, Gly, Asn, Pro or Ser
  MOD_RES (27)...(27): Xaa = Ala, Asp, Glu, Phe, His, Leu, Met, Gln, Arg, Ser, Thr, Trp or Tyr
  MOD_RES (28)...(28): Xaa = Ala, Asp, Glu, Phe, Gly, His, Ile, Lys, Leu, Met, Asn, Gln, Arg, Ser, Thr, Val or Tyr
  MOD_RES (29)...(29): Xaa = Ala, Phe, Gly, Ile, Lys, Leu, Met, Pro, Gln, Arg, Ser, Thr, Val, Trp or Tyr
  MOD_RES (30)...(30): Xaa = Ala, Asp, Glu, Phe, Gly, His, Lys, Leu, Met, Asn, Pro, Gln, Arg, Ser, Thr, Val or Trp
  MOD_RES (31)...(31): Xaa = Ala, Asp, Glu, Gly, Ile, Lys, Leu, Met, Asn, Pro, Gln, Arg, Ser, Thr, Val or Tyr
  MOD_RES (32)...(32): Xaa = Ala, Asp, Glu, Phe, Gly, His, Ile, Lys, Leu, Met, Asn, Gln, Ser, Thr or Val
  MOD_RES (33)...(33): Xaa = Glu, Phe, Gly, His, Ile, Lys, Leu, Met, Asn, Pro, Gln, Arg, Ser, Thr or Trp
  MOD_RES (34)...(34): Xaa = Ala, Asp, Glu, Phe, Gly, His, Lys, Leu, Met, Asn, Pro, Gln, Arg, Ser, Thr, Val or Tyr
CXXXXXCXXXCXXXXXXXXXCXCXXXXXXXXXXXC

SEQ ID NO: 288 - protein, 36 aa, Artificial Sequence
  EGF domain monomer sequence
  MOD_RES (2)...(2): Xaa = Ala, Asp, Glu, Gly, Ile, Lys, Leu, Gln, Arg, Ser, Thr or Val
  MOD_RES (3)...(3): Xaa = Ala, Asp, Glu, Phe, Gly, His, Ile, Lys, Leu, Met, Asn, Pro, Gln, Arg, Ser, Thr or Val
  MOD_RES (4)...(4): Xaa = Ala, Glu, Phe, Gly, His, Leu, Asn, Pro, Gln, Arg, Ser, Thr, Trp or Tyr
  MOD_RES (5)...(5): Xaa = Ala, Asp, Glu, Phe, Gly, His, Ile, Lys, Leu, Asn, Pro, Arg, Ser or Thr
  MOD_RES (6)...(6): Xaa = Ala, Phe, Gly, Ile, Lys, Leu, Met, Asn, Pro, Gln, Arg, Ser, Thr, Val or Tyr
  MOD_RES (8)...(8): Xaa = Ala, Asp, Glu, Gly, His, Lys, Asn, Pro, Gln, Ser, Thr or Val
  MOD_RES (9)...(9): Xaa = Phe, Gly, His, Leu, Asn, Gln, Ser, Thr or Tyr
  MOD_RES (10)...(10): Xaa = Ala, Asp, Glu, Phe, Gly, His, Ile, Lys, Leu, Asn, Gln, Arg, Ser, Thr, Val or Tyr
  MOD_RES (12)...(12): Xaa = Ala, Asp, Phe, His, Ile, Lys, Leu, Met, Asn, Gln, Arg, Ser, Thr, Val or Tyr
  MOD_RES (13)...(13): Xaa = Ala, Asp, Glu, Phe, His, Leu, Met, Asn, Pro, Gln, Arg, Ser, Val or Tyr
  MOD_RES (14)...(14): Xaa = Ala, Asp, Glu, Phe, Gly, His, Leu, Asn, Arg, Ser, Thr, Val or Tyr
  MOD_RES (15)...(15): Xaa = Ala, Asp, Glu, Gly, Asn, Pro, Gln, Arg, Ser or Thr
  MOD_RES (16)...(16): Xaa = Ala, Asp, Glu, Phe, Gly, Lys, Leu, Asn, Pro, Gln, Arg, Ser or Thr
  MOD_RES (17)...(17): Xaa = Ala, Asp, Glu, Gly, Met, Asn, Arg, Ser, Thr, Val or Tyr
  MOD_RES (18)...(18): Xaa = Ala, Asp, Glu, Gly, Lys, Leu, Met, Gln, Arg, Ser or Thr
  MOD_RES (19)...(19): Xaa = Phe, His, Ile, Pro, Arg, Val, Trp or Tyr
  MOD_RES (20)...(20): Xaa = Ala, Glu, His, Lys, Leu, Gln, Ser, Thr, Val or Tyr
  MOD_RES (22)...(22): Xaa = Ala, Asp, Glu, Phe, Gly, His, Ile, Lys, Leu, Met, Asn, Pro, Gln, Arg, Ser, Thr, Val, Trp or Tyr
  MOD_RES (24)...(24): Xaa = Ala, Asp, Glu, Phe, Gly, His, Ile, Lys, Leu, Asn, Pro, Gln, Arg, Ser, Thr, Val or Tyr
  MOD_RES (25)...(25): Xaa = Ala, Asp, Glu, Phe, His, Ile, Lys, Leu, Met, Asn, Pro, Gln, Arg, Ser, Thr or Val
  MOD_RES (26)...(26): Xaa = Asp, Glu, Gly, Asn, Pro or Ser
  MOD_RES (27)...(27): Xaa = Ala, Asp, Glu, Phe, His, Leu, Met, Gln, Arg, Ser, Thr, Trp or Tyr
  MOD_RES (28)...(28): Xaa = Ala, Asp, Glu, Phe, Gly, His, Ile, Lys, Leu, Met, Asn, Gln, Arg, Ser, Thr, Val or Tyr
  MOD_RES (29)...(29): Xaa = Ala, Phe, Gly, Ile, Lys, Leu, Met, Pro, Gln, Arg, Ser, Thr, Val, Trp or Tyr
  MOD_RES (30)...(30): Xaa = Ala, Asp, Glu, Phe, Gly, His, Lys, Leu, Met, Asn, Pro, Gln, Arg, Ser, Thr, Val or Trp
  MOD_RES (31)...(31): Xaa = Ala, Asp, Glu, Gly, Ile, Lys, Leu, Met, Asn, Pro, Gln, Arg, Ser, Thr, Val or Tyr
  MOD_RES (32)...(32): Xaa = Ala, Asp, Glu, Phe, Gly, His, Ile, Lys, Leu, Met, Asn, Gln, Ser, Thr or Val
  MOD_RES (33)...(33): Xaa = Glu, Phe, Gly, His, Ile, Lys, Leu, Met, Asn, Pro, Gln, Arg, Ser, Thr or Trp
  MOD_RES (34)...(34): Xaa = Ala, Asp, Glu, Phe, Gly, His, Lys, Leu, Met, Asn, Pro, Gln, Arg, Ser, Thr, Val or Tyr
  MOD_RES (35)...(35): Xaa = Ala, Asp, Glu, Phe, Gly, His, Ile, Lys, Met, Asn, Gln, Arg, Ser, Thr, Val or Tyr
CXXXXXCXXXCXXXXXXXXXCXCXXXXXXXXXXXXC

SEQ ID NO: 289 - protein, 33 aa, Artificial Sequence
  EGF domain monomer sequence
  MOD_RES (2)...(2): Xaa = Ala, Asp, Glu, Phe, Gly, Ile, Lys, Leu, Met, Asn, Pro, Gln, Arg, Ser, Thr, Val or Tyr
  MOD_RES (3)...(3): Xaa = Ala, Asp, Glu, Phe, Gly, His, Ile, Lys, Leu, Met, Asn, Pro, Gln, Arg, Ser, Thr, Val or Tyr
  MOD_RES (4)...(4): Xaa = Ala, Asp, Glu, Phe, Gly, His, Ile, Lys, Leu, Met, Asn, Pro, Gln, Arg, Ser, Thr, Val or Trp
  MOD_RES (5)...(5): Xaa = Ala, Asp, Glu, Phe, Gly, His, Ile, Lys, Leu, Met, Asn, Pro, Gln, Arg, Ser, Thr or Val
  MOD_RES (6)...(6): Xaa = Ala, Asp, Glu, Phe, Gly, His, Ile, Lys, Leu, Asn, Pro, Gln, Arg, Ser, Val or Tyr
  MOD_RES (7)...(7): Xaa = Ala, Asp, Glu, Gly, Ile, Lys, Leu, Met, Asn, Pro, Gln, Arg, Ser, Thr, Val or Tyr
  MOD_RES (9)...(9): Xaa = Ala, Asp, Glu, Gly, His, Lys, Asn, Pro, Gln, Ser, Thr or Val
  MOD_RES (10)...(10): Xaa = Phe, Gly, His, Leu, Asn, Gln, Ser, Thr or Tyr
  MOD_RES (11)...(11): Xaa = Ala, Asp, Glu, Phe, Gly, His, Ile, Lys, Leu, Asn, Gln, Arg, Ser, Thr, Val or Tyr
  MOD_RES (13)...(13): Xaa = Ala, Asp, Phe, His, Ile, Lys, Leu, Met, Asn, Gln, Arg, Ser, Thr, Val or Tyr
  MOD_RES (14)...(14): Xaa = Ala, Asp, Glu, Phe, His, Leu, Met, Asn, Pro, Gln, Arg, Ser, Val or Tyr
  MOD_RES (15)...(15): Xaa = Ala, Asp, Glu, Phe, Gly, His, Leu, Asn, Arg, Ser, Thr, Val or Tyr
  MOD_RES (16)...(16): Xaa = Ala, Asp, Glu, Gly, Asn, Pro, Gln, Arg, Ser or Thr
  MOD_RES (17)...(17): Xaa = Ala, Asp, Glu, Phe, Gly, Lys, Leu, Asn, Pro, Gln, Arg, Ser or Thr
  MOD_RES (18)...(18): Xaa = Ala, Asp, Glu, Gly, Met, Asn, Arg, Ser, Thr, Val or Tyr
  MOD_RES (19)...(19): Xaa = Ala, Asp, Glu, Gly, Lys, Leu, Met, Gln, Arg, Ser or Thr
  MOD_RES (20)...(20): Xaa = Phe, His, Ile, Pro, Arg, Val, Trp or Tyr
  MOD_RES (21)...(21): Xaa = Ala, Glu, His, Lys, Leu, Gln, Ser, Thr, Val or Tyr
  MOD_RES (23)...(23): Xaa = Ala, Asp, Glu, Phe, Gly, His, Ile, Lys, Leu, Met, Asn, Pro, Gln, Arg, Ser, Thr, Val, Trp or Tyr
  MOD_RES (25)...(25): Xaa = Ala, Asp, Glu, Phe, His, Lys, Leu, Met, Asn, Pro, Gln, Arg, Ser, Thr, Val, Trp or Tyr
  MOD_RES (26)...(26): Xaa = Ala, Asp, Glu, Phe, Gly, His, Lys, Leu, Asn, Pro, Gln, Arg, Ser, Thr, Val or Tyr
  MOD_RES (27)...(27): Xaa = Ala, Glu, Gly, His, Lys, Leu, Asn, Pro, Arg, Ser, Thr or Tyr
  MOD_RES (28)...(28): Xaa = Phe, His, Ile, Leu, Met, Arg, Thr, Trp or Tyr
  MOD_RES (29)...(29): Xaa = Ala, Asp, Glu, Phe, Gly, His, Ile, Lys, Leu, Met, Asn, Gln, Arg, Ser, Thr, Val or Tyr
  MOD_RES (30)...(30): Xaa = Asp, Gly or Ser
  MOD_RES (31)...(31): Xaa = Ala, Asp, Glu, Phe, His, Ile, Lys, Leu, Asn, Pro, Gln, Arg, Ser, Thr, Val or Tyr
  MOD_RES (32)...(32): Xaa = Ala, Asp, Glu, Phe, His, Ile, Lys, Leu, Met, Asn, Gln, Arg, Ser, Thr or Tyr
CXXXXXXCXXXCXXXXXXXXXCXCXXXXXXXXC

SEQ ID NO: 290 - protein, 34 aa, Artificial Sequence
  EGF domain monomer sequence
  MOD_RES (2)...(2): Xaa = Ala, Asp, Glu, Phe, Gly, Ile, Lys, Leu, Met, Asn, Pro, Gln, Arg, Ser, Thr, Val or Tyr
  MOD_RES (3)...(3): Xaa = Ala, Asp, Glu, Phe, Gly, His, Ile, Lys, Leu, Met, Asn, Pro, Gln, Arg, Ser, Thr, Val or Tyr
  MOD_RES (4)...(4): Xaa = Ala, Asp, Glu, Phe, Gly, His, Ile, Lys, Leu, Met, Asn, Pro, Gln, Arg, Ser, Thr, Val or Trp
  MOD_RES (5)...(5): Xaa = Ala, Asp, Glu, Phe, Gly, His, Ile, Lys, Leu, Met, Asn, Pro, Gln, Arg, Ser, Thr or Val
  MOD_RES (6)...(6): Xaa = Ala, Asp, Glu, Phe, Gly, His, Ile, Lys, Leu, Asn, Pro, Gln, Arg, Ser, Val or Tyr
  MOD_RES (7)...(7): Xaa = Ala, Asp, Glu, Gly, Ile, Lys, Leu, Met, Asn, Pro, Gln, Arg, Ser, Thr, Val or Tyr
  MOD_RES (9)...(9): Xaa = Ala, Asp, Glu, Gly, His, Lys, Asn, Pro, Gln, Ser, Thr or Val
  MOD_RES (10)...(10): Xaa = Phe, Gly, His, Leu, Asn, Gln, Ser, Thr or Tyr
  MOD_RES (11)...(11): Xaa = Ala, Asp, Glu, Phe, Gly, His, Ile, Lys, Leu, Asn, Gln, Arg, Ser, Thr, Val or Tyr
  MOD_RES (13)...(13): Xaa = Ala, Asp, Phe, His, Ile, Lys, Leu, Met, Asn, Gln, Arg, Ser, Thr, Val or Tyr
  MOD_RES (14)...(14): Xaa = Ala, Asp, Glu, Phe, His, Leu, Met, Asn, Pro, Gln, Arg, Ser, Val or Tyr
  MOD_RES (15)...(15): Xaa = Ala, Asp, Glu, Phe, Gly, His, Leu, Asn, Arg, Ser, Thr, Val or Tyr
  MOD_RES (16)...(16): Xaa = Ala, Asp, Glu, Gly, Asn, Pro, Gln, Arg, Ser or Thr
  MOD_RES (17)...(17): Xaa = Ala, Asp, Glu, Phe, Gly, Lys, Leu, Asn, Pro, Gln, Arg, Ser or Thr
  MOD_RES (18)...(18): Xaa = Ala, Asp, Glu, Gly, Met, Asn, Arg, Ser, Thr, Val or Tyr
  MOD_RES (19)...(19): Xaa = Ala, Asp, Glu, Gly, Lys, Leu, Met, Gln, Arg, Ser or Thr
  MOD_RES (20)...(20): Xaa = Phe, His, Ile, Pro, Arg, Val, Trp or Tyr
  MOD_RES (21)...(21): Xaa = Ala, Glu, His, Lys, Leu, Gln, Ser, Thr, Val or Tyr
  MOD_RES (23)...(23): Xaa = Ala, Asp, Glu, Phe, Gly, His, Ile, Lys, Leu, Met, Asn, Pro, Gln, Arg, Ser, Thr, Val, Trp or Tyr
  MOD_RES (25)...(25): Xaa = Ala, Asp, Glu, Phe, Gly, His, Ile, Lys, Leu, Asn, Pro, Gln, Arg, Ser, Thr, Val or Tyr
  MOD_RES (26)...(26): Xaa = Ala, Asp, Glu, Phe, His, Ile, Lys, Leu, Met, Asn, Pro, Gln, Arg, Ser, Thr or Val
  MOD_RES (27)...(27): Xaa = Asp, Glu, Gly, Asn, Pro or Ser
  MOD_RES (28)...(28): Xaa = Ala, Asp, Glu, Phe, His, Leu, Met, Gln, Arg, Ser, Thr, Trp or Tyr
  MOD_RES (29)...(29): Xaa = Ala, Asp, Glu, Phe, Gly, His, Ile, Lys, Leu, Met, Asn, Gln, Arg, Ser, Thr, Val or Tyr
  MOD_RES (30)...(30): Xaa = Ala, Phe, Gly, Ile, Lys, Leu, Met, Pro, Gln, Arg, Ser, Thr, Val, Trp or Tyr
  MOD_RES (31)...(31): Xaa = Ala, Asp, Glu, Phe, Gly, His, Lys, Leu, Met, Asn, Pro, Gln, Arg, Ser, Thr, Val or Trp
  MOD_RES (32)...(32): Xaa = Ala, Asp, Glu, Gly, Ile, Lys, Leu, Met, Asn, Pro, Gln, Arg, Ser, Thr, Val or Tyr
  MOD_RES (33)...(33): Xaa = Ala, Asp, Glu, Phe, Gly, His, Ile, Lys, Leu, Met, Asn, Gln, Ser, Thr or Val
CXXXXXXCXXXCXXXXXXXXXCXCXXXXXXXXXC

SEQ ID NO: 291 - protein, 35 aa, Artificial Sequence
  EGF domain monomer sequence
  MOD_RES (2)...(2): Xaa = Ala, Asp, Glu, Phe, Gly, Ile, Lys, Leu, Met, Asn, Pro, Gln, Arg, Ser, Thr, Val or Tyr
  MOD_RES (3)...(3): Xaa = Ala, Asp, Glu, Phe, Gly, His, Ile, Lys, Leu, Met, Asn, Pro, Gln, Arg, Ser, Thr, Val or Tyr
  MOD_RES (4)...(4): Xaa = Ala, Asp, Glu, Phe, Gly, His, Ile, Lys, Leu, Met, Asn, Pro, Gln, Arg, Ser, Thr, Val or Trp
  MOD_RES (5)...(5): Xaa = Ala, Asp, Glu, Phe, Gly, His, Ile, Lys, Leu, Met, Asn, Pro, Gln, Arg, Ser, Thr or Val
  MOD_RES (6)...(6): Xaa = Ala, Asp, Glu, Phe, Gly, His, Ile, Lys, Leu, Asn, Pro, Gln, Arg, Ser, Val or Tyr
  MOD_RES (7)...(7): Xaa = Ala, Asp, Glu, Gly, Ile, Lys, Leu, Met, Asn, Pro, Gln, Arg, Ser, Thr, Val or Tyr
  MOD_RES (9)...(9): Xaa = Ala, Asp, Glu, Gly, His, Lys, Asn, Pro, Gln, Ser, Thr or Val
  MOD_RES (10)...(10): Xaa = Phe, Gly, His, Leu, Asn, Gln, Ser, Thr or Tyr
  MOD_RES (11)...(11): Xaa = Ala, Asp, Glu, Phe, Gly, His, Ile, Lys, Leu, Asn, Gln, Arg, Ser, Thr, Val or Tyr
  MOD_RES (13)...(13): Xaa = Ala, Asp, Phe, His, Ile, Lys, Leu, Met, Asn, Gln, Arg, Ser, Thr, Val or Tyr
  MOD_RES (14)...(14): Xaa = Ala, Asp, Glu, Phe, His, Leu, Met, Asn, Pro, Gln, Arg, Ser, Val or Tyr
  MOD_RES (15)...(15): Xaa = Ala, Asp, Glu, Phe, Gly, His, Leu, Asn, Arg, Ser, Thr, Val or Tyr
  MOD_RES (16)...(16): Xaa = Ala, Asp, Glu, Gly, Asn, Pro, Gln, Arg, Ser or Thr
  MOD_RES (17)...(17): Xaa = Ala, Asp, Glu, Phe, Gly, Lys, Leu, Asn, Pro, Gln, Arg, Ser or Thr
  MOD_RES (18)...(18): Xaa = Ala, Asp, Glu, Gly, Met, Asn, Arg, Ser, Thr, Val or Tyr
  MOD_RES (19)...(19): Xaa = Ala, Asp, Glu, Gly, Lys, Leu, Met, Gln, Arg, Ser or Thr
  MOD_RES (20)...(20): Xaa = Phe, His, Ile, Pro, Arg, Val, Trp or Tyr
  MOD_RES (21)...(21): Xaa = Ala, Glu, His, Lys, Leu, Gln, Ser, Thr, Val or Tyr
  MOD_RES (23)...(23): Xaa = Ala, Asp, Glu, Phe, Gly, His, Ile, Lys, Leu, Met, Asn, Pro, Gln, Arg, Ser, Thr, Val, Trp or Tyr
  MOD_RES (25)...(25): Xaa = Ala, Asp, Glu, Phe, Gly, His, Ile, Lys, Leu, Asn, Pro, Gln, Arg, Ser, Thr, Val or Tyr
  MOD_RES (26)...(26): Xaa = Ala, Asp, Glu, Phe, His, Ile, Lys, Leu, Met, Asn, Pro, Gln, Arg, Ser, Thr or Val
  MOD_RES (27)...(27): Xaa = Asp, Glu, Gly, Asn, Pro or Ser
  MOD_RES (28)...(28): Xaa = Ala, Asp, Glu, Phe, His, Leu, Met, Gln, Arg, Ser, Thr, Trp or Tyr
  MOD_RES (29)...(29): Xaa = Ala, Asp, Glu, Phe, Gly, His, Ile, Lys, Leu, Met, Asn, Gln, Arg, Ser, Thr, Val or Tyr
  MOD_RES (30)...(30): Xaa = Ala, Phe, Gly, Ile, Lys, Leu, Met, Pro, Gln, Arg, Ser, Thr, Val, Trp or Tyr
  MOD_RES (31)...(31): Xaa = Ala, Asp, Glu, Phe, Gly, His, Lys, Leu, Met, Asn, Pro, Gln, Arg, Ser, Thr, Val or Trp
  MOD_RES (32)...(32): Xaa = Ala, Asp, Glu, Gly, Ile, Lys, Leu, Met, Asn, Pro, Gln, Arg, Ser, Thr, Val or Tyr
  MOD_RES (33)...(33): Xaa = Ala, Asp, Glu, Phe, Gly, His, Ile, Lys, Leu, Met, Asn, Gln, Ser, Thr or Val
  MOD_RES (34)...(34): Xaa = Glu, Phe, Gly, His, Ile, Lys, Leu, Met, Asn, Pro, Gln, Arg, Ser, Thr or Trp
CXXXXXXCXXXCXXXXXXXXXCXCXXXXXXXXXXC

SEQ ID NO: 292 - protein, 36 aa, Artificial Sequence
  EGF domain monomer sequence
  MOD_RES (2)...(2): Xaa = Ala, Asp, Glu, Phe, Gly, Ile, Lys, Leu, Met, Asn, Pro, Gln, Arg, Ser, Thr, Val or Tyr
  MOD_RES (3)...(3): Xaa = Ala, Asp, Glu, Phe, Gly, His, Ile, Lys, Leu, Met, Asn, Pro, Gln, Arg, Ser, Thr, Val or Tyr
  MOD_RES (4)...(4): Xaa = Ala, Asp, Glu, Phe, Gly, His, Ile, Lys, Leu, Met, Asn, Pro, Gln, Arg, Ser, Thr, Val or Trp
  MOD_RES (5)...(5): Xaa = Ala, Asp, Glu, Phe, Gly, His, Ile, Lys, Leu, Met, Asn, Pro, Gln, Arg, Ser, Thr or Val
  MOD_RES (6)...(6): Xaa = Ala, Asp, Glu, Phe, Gly, His, Ile, Lys, Leu, Asn, Pro, Gln, Arg, Ser, Val or Tyr
  MOD_RES (7)...(7): Xaa = Ala, Asp, Glu, Gly, Ile, Lys, Leu, Met, Asn, Pro, Gln, Arg, Ser, Thr, Val or Tyr
  MOD_RES (9)...(9): Xaa = Ala, Asp, Glu, Gly, His, Lys, Asn, Pro, Gln, Ser, Thr or Val
  MOD_RES (10)...(10): Xaa = Phe, Gly, His, Leu, Asn, Gln, Ser, Thr or Tyr
  MOD_RES (11)...(11): Xaa = Ala, Asp, Glu, Phe, Gly, His, Ile, Lys, Leu, Asn, Gln, Arg, Ser, Thr, Val or Tyr
  MOD_RES (13)...(13): Xaa = Ala, Asp, Phe, His, Ile, Lys, Leu, Met, Asn, Gln, Arg, Ser, Thr, Val or Tyr
  MOD_RES (14)...(14): Xaa = Ala, Asp, Glu, Phe, His, Leu, Met, Asn, Pro, Gln, Arg, Ser, Val or Tyr
  MOD_RES (15)...(15): Xaa = Ala, Asp, Glu, Phe, Gly, His, Leu, Asn, Arg, Ser, Thr, Val or Tyr
  MOD_RES (16)...(16): Xaa = Ala, Asp, Glu, Gly, Asn, Pro, Gln, Arg, Ser or Thr
  MOD_RES (17)...(17): Xaa = Ala, Asp, Glu, Phe, Gly, Lys, Leu, Asn, Pro, Gln, Arg, Ser or Thr
  MOD_RES (18)...(18): Xaa = Ala, Asp, Glu, Gly, Met, Asn, Arg, Ser, Thr, Val or Tyr
  MOD_RES (19)...(19): Xaa = Ala, Asp, Glu, Gly, Lys, Leu, Met, Gln, Arg, Ser or Thr
  MOD_RES (20)...(20): Xaa = Phe, His, Ile, Pro, Arg, Val, Trp or Tyr
  MOD_RES (21)...(21): Xaa = Ala, Glu, His, Lys, Leu, Gln, Ser, Thr, Val or Tyr
  MOD_RES (23)...(23): Xaa = Ala, Asp, Glu, Phe, Gly, His, Ile, Lys, Leu, Met, Asn, Pro, Gln, Arg, Ser, Thr, Val, Trp or Tyr
  MOD_RES (25)...(25): Xaa = Ala, Asp, Glu, Phe, Gly, His, Ile, Lys, Leu, Asn, Pro, Gln, Arg, Ser, Thr, Val or Tyr
  MOD_RES (26)...(26): Xaa = Ala, Asp, Glu, Phe, His, Ile, Lys, Leu, Met, Asn, Pro, Gln, Arg, Ser, Thr or Val
  MOD_RES (27)...(27): Xaa = Asp, Glu, Gly, Asn, Pro or Ser
  MOD_RES (28)...(28): Xaa = Ala, Asp, Glu, Phe, His, Leu, Met, Gln, Arg, Ser, Thr, Trp or Tyr
  MOD_RES (29)...(29): Xaa = Ala, Asp, Glu, Phe, Gly, His, Ile, Lys, Leu, Met, Asn, Gln, Arg, Ser, Thr, Val or Tyr
  MOD_RES (30)...(30): Xaa = Ala, Phe, Gly, Ile, Lys, Leu, Met, Pro, Gln, Arg, Ser, Thr, Val, Trp or Tyr
  MOD_RES (31)...(31): Xaa = Ala, Asp, Glu, Phe, Gly, His, Lys, Leu, Met, Asn, Pro, Gln, Arg, Ser, Thr, Val or Trp
  MOD_RES (32)...(32): Xaa = Ala, Asp, Glu, Gly, Ile, Lys, Leu, Met, Asn, Pro, Gln, Arg, Ser, Thr, Val or Tyr
  MOD_RES (33)...(33): Xaa = Ala, Asp, Glu, Phe, Gly, His, Ile, Lys, Leu, Met, Asn, Gln, Ser, Thr or Val
  MOD_RES (34)...(34): Xaa = Glu, Phe, Gly, His, Ile, Lys, Leu, Met, Asn, Pro, Gln, Arg, Ser, Thr or Trp
  MOD_RES (35)...(35): Xaa = Ala, Asp, Glu, Phe, Gly, His, Lys, Leu, Met, Asn, Pro, Gln, Arg, Ser, Thr, Val or Tyr
CXXXXXXCXXXCXXXXXXXXXCXCXXXXXXXXXXXC

SEQ ID NO: 293 - protein, 37 aa, Artificial Sequence
  EGF domain monomer sequence
  MOD_RES (2)...(2): Xaa = Ala, Asp, Glu, Phe, Gly, Ile, Lys, Leu, Met, Asn, Pro, Gln, Arg, Ser, Thr, Val or Tyr
  MOD_RES (3)...(3): Xaa = Ala, Asp, Glu, Phe, Gly, His, Ile, Lys, Leu, Met, Asn, Pro, Gln, Arg, Ser, Thr, Val or Tyr
  MOD_RES (4)...(4): Xaa = Ala, Asp, Glu, Phe, Gly, His, Ile, Lys, Leu, Met, Asn, Pro, Gln, Arg, Ser, Thr, Val or Trp
  MOD_RES (5)...(5): Xaa = Ala, Asp, Glu, Phe, Gly, His, Ile, Lys, Leu, Met, Asn, Pro, Gln, Arg, Ser, Thr or Val
  MOD_RES (6)...(6): Xaa = Ala, Asp, Glu, Phe, Gly, His, Ile, Lys, Leu, Asn, Pro, Gln, Arg, Ser, Val or Tyr
  MOD_RES (7)...(7): Xaa = Ala, Asp, Glu, Gly, Ile, Lys, Leu, Met, Asn, Pro, Gln, Arg, Ser, Thr, Val or Tyr
  MOD_RES (9)...(9): Xaa = Ala, Asp, Glu, Gly, His, Lys, Asn, Pro, Gln, Ser, Thr or Val
  MOD_RES (10)...(10): Xaa = Phe, Gly, His, Leu, Asn, Gln, Ser, Thr or Tyr
  MOD_RES (11)...(11): Xaa = Ala, Asp, Glu, Phe, Gly, His, Ile, Lys, Leu, Asn, Gln, Arg, Ser, Thr, Val or Tyr
  MOD_RES (13)...(13): Xaa = Ala, Asp, Phe, His, Ile, Lys, Leu, Met, Asn, Gln, Arg, Ser, Thr, Val or Tyr
  MOD_RES (14)...(14): Xaa = Ala, Asp, Glu, Phe, His, Leu, Met, Asn, Pro, Gln, Arg, Ser, Val or Tyr
  MOD_RES (15)...(15): Xaa = Ala, Asp, Glu, Phe, Gly, His, Leu, Asn, Arg, Ser, Thr, Val or Tyr
  MOD_RES (16)...(16): Xaa = Ala, Asp, Glu, Gly, Asn, Pro, Gln, Arg, Ser or Thr
  MOD_RES (17)...(17): Xaa = Ala, Asp, Glu, Phe, Gly, Lys, Leu, Asn, Pro, Gln, Arg, Ser or Thr
  MOD_RES (18)...(18): Xaa = Ala, Asp, Glu, Gly, Met, Asn, Arg, Ser, Thr, Val or Tyr
  MOD_RES (19)...(19): Xaa = Ala, Asp, Glu, Gly, Lys, Leu, Met, Gln, Arg, Ser or Thr
  MOD_RES (20)...(20): Xaa = Phe, His, Ile, Pro, Arg, Val, Trp or Tyr
  MOD_RES (21)...(21): Xaa = Ala, Glu, His, Lys, Leu, Gln, Ser, Thr, Val or Tyr
  MOD_RES (23)...(23): Xaa = Ala, Asp, Glu, Phe, Gly, His, Ile, Lys, Leu, Met, Asn, Pro, Gln, Arg, Ser, Thr, Val, Trp or Tyr
  MOD_RES (25)...(25): Xaa = Ala, Asp, Glu, Phe, Gly, His, Ile, Lys, Leu, Asn, Pro, Gln, Arg, Ser, Thr, Val or Tyr
  MOD_RES (26)...(26): Xaa = Ala, Asp, Glu, Phe, His, Ile, Lys, Leu, Met, Asn, Pro, Gln, Arg, Ser, Thr or Val
  MOD_RES (27)...(27): Xaa = Asp, Glu, Gly, Asn, Pro or Ser
  MOD_RES (28)...(28): Xaa = Ala, Asp, Glu, Phe, His, Leu, Met, Gln, Arg, Ser, Thr, Trp or Tyr
  MOD_RES (29)...(29): Xaa = Ala, Asp, Glu, Phe, Gly, His, Ile, Lys, Leu, Met, Asn, Gln, Arg, Ser, Thr, Val or Tyr
  MOD_RES (30)...(30): Xaa = Ala, Phe, Gly, Ile, Lys, Leu, Met, Pro, Gln, Arg, Ser, Thr, Val, Trp or Tyr
  MOD_RES (31)...(31): Xaa = Ala, Asp, Glu, Phe, Gly, His, Lys, Leu, Met, Asn, Pro, Gln, Arg, Ser, Thr, Val or Trp
  MOD_RES (32)...(32): Xaa = Ala, Asp, Glu, Gly, Ile, Lys, Leu, Met, Asn, Pro, Gln, Arg, Ser, Thr, Val or Tyr
  MOD_RES (33)...(33): Xaa = Ala, Asp, Glu, Phe, Gly, His, Ile, Lys, Leu, Met, Asn, Gln, Ser, Thr or Val
  MOD_RES (34)...(34): Xaa = Glu, Phe, Gly, His, Ile, Lys, Leu, Met, Asn, Pro, Gln, Arg, Ser, Thr or Trp
  MOD_RES (35)...(35): Xaa = Ala, Asp, Glu, Phe, Gly, His, Lys, Leu, Met, Asn, Pro, Gln, Arg, Ser, Thr, Val or Tyr
  MOD_RES (36)...(36): Xaa = Ala, Asp, Glu, Phe, Gly, His, Ile, Lys, Met, Asn, Gln, Arg, Ser, Thr, Val or Tyr
CXXXXXXCXXXCXXXXXXXXXCXCXXXXXXXXXXXXC

SEQ ID NO: 294 - protein, 32 aa, Artificial Sequence
  EGF domain monomer sequence
  MOD_RES (2)...(2): Xaa = Ala, Asp, Glu, Phe, Gly, His, Ile, Lys, Leu, Asn, Pro, Gln, Arg, Ser, Thr, Val or Trp
  MOD_RES (3)...(3): Xaa = Ala, Asp, Glu, Gly, His, Lys, Leu, Met, Asn, Pro, Arg, Ser, Thr or Tyr
  MOD_RES (4)...(4): Xaa = Ala, Asp, Glu, Gly, His, Lys, Leu, Met, Asn, Pro, Gln, Arg, Ser, Thr, Val or Trp
  MOD_RES (5)...(5): Xaa = Ala, Glu, Gly, Met, Asn, Pro, Gln, Arg, Ser, Thr or Tyr
  MOD_RES (7)...(7): Xaa = Ala, Asp, Glu, Phe, Gly, His, Ile, Lys, Leu, Met, Asn, Pro, Gln, Arg, Ser, Thr or Val
  MOD_RES (8)...(8): Xaa = Ala, Asp, Glu, Phe, Gly, His, Lys, Leu, Asn, Pro, Gln, Arg, Ser, Thr or Tyr
  MOD_RES (9)...(9): Xaa = Ala, Gly or Thr
  MOD_RES (10)...(10): Xaa = Ala, Asp, Glu, Phe, His, Ile, Lys, Leu, Met, Asn, Gln, Arg, Ser, Thr or Val
  MOD_RES (12)...(12): Xaa = Ala, Asp, Phe, His, Ile, Lys, Leu, Met, Asn, Gln, Arg, Ser, Thr, Val or Tyr
  MOD_RES (13)...(13): Xaa = Ala, Asp, Glu, Phe, His, Leu, Met, Asn, Pro, Gln, Arg, Ser, Val or Tyr
  MOD_RES (14)...(14): Xaa = Ala, Asp, Glu, Phe, Gly, His, Leu, Asn, Arg, Ser, Thr, Val or Tyr
  MOD_RES (15)...(15): Xaa = Ala, Asp, Glu, Gly, Asn, Pro, Gln, Arg, Ser or Thr
  MOD_RES (16)...(16): Xaa = Ala, Asp, Glu, Phe, Gly, Lys, Leu, Asn, Pro, Gln, Arg, Ser or Thr
  MOD_RES (17)...(17): Xaa = Ala, Asp, Glu, Gly, Met, Asn, Arg, Ser, Thr, Val or Tyr
  MOD_RES (18)...(18): Xaa = Ala, Asp, Glu, Gly, Lys, Leu, Met, Gln, Arg, Ser or Thr
  MOD_RES (19)...(19): Xaa = Phe, His, Ile, Pro, Arg, Val, Trp or Tyr
  MOD_RES (20)...(20): Xaa = Ala, Glu, His, Lys, Leu, Gln, Ser, Thr, Val or Tyr
  MOD_RES (22)...(22): Xaa = Ala, Asp, Glu, Phe, Gly, His, Ile, Lys, Leu, Met, Asn, Pro, Gln, Arg, Ser, Thr, Val, Trp or Tyr
  MOD_RES (24)...(24): Xaa = Ala, Asp, Glu, Phe, His, Lys, Leu, Met, Asn, Pro, Gln, Arg, Ser, Thr, Val, Trp or Tyr
  MOD_RES (25)...(25): Xaa = Ala, Asp, Glu, Phe, Gly, His, Lys, Leu, Asn, Pro, Gln, Arg, Ser, Thr, Val or Tyr
  MOD_RES (26)...(26): Xaa = Ala, Glu, Gly, His, Lys, Leu, Asn, Pro, Arg, Ser, Thr or Tyr
  MOD_RES (27)...(27): Xaa = Phe, His, Ile, Leu, Met, Arg, Thr, Trp or Tyr
  MOD_RES (28)...(28): Xaa = Ala, Asp, Glu, Phe, Gly, His, Ile, Lys, Leu, Met, Asn, Gln, Arg, Ser, Thr, Val or Tyr
  MOD_RES (29)...(29): Xaa = Asp, Gly or Ser
  MOD_RES (30)...(30): Xaa = Ala, Asp, Glu, Phe, His, Ile, Lys, Leu, Asn, Pro, Gln, Arg, Ser, Thr, Val or Tyr
  MOD_RES (31)...(31): Xaa = Ala, Asp, Glu, Phe, His, Ile, Lys, Leu, Met, Asn, Gln, Arg, Ser, Thr or Tyr
CXXXXCXXXXCXXXXXXXXXCXCXXXXXXXXC

SEQ ID NO: 295 - protein, 33 aa, Artificial Sequence
  EGF domain monomer sequence
  MOD_RES (2)...(2): Xaa = Ala, Asp, Glu, Phe, Gly, His, Ile, Lys, Leu, Asn, Pro, Gln, Arg, Ser, Thr, Val or Trp
  MOD_RES (3)...(3): Xaa = Ala, Asp, Glu, Gly, His, Lys, Leu, Met, Asn, Pro, Arg, Ser, Thr or Tyr
  MOD_RES (4)...(4): Xaa = Ala, Asp, Glu, Gly, His, Lys, Leu, Met, Asn, Pro, Gln, Arg, Ser, Thr, Val or Trp
  MOD_RES (5)...(5): Xaa = Ala, Glu, Gly, Met, Asn, Pro, Gln, Arg, Ser, Thr or Tyr
  MOD_RES (7)...(7): Xaa = Ala, Asp, Glu, Phe, Gly, His, Ile, Lys, Leu, Met, Asn, Pro, Gln, Arg, Ser, Thr or Val
  MOD_RES (8)...(8): Xaa = Ala, Asp, Glu, Phe, Gly, His, Lys, Leu, Asn, Pro, Gln, Arg, Ser, Thr or Tyr
  MOD_RES (9)...(9): Xaa = Ala, Gly or Thr
  MOD_RES (10)...(10): Xaa = Ala, Asp, Glu, Phe, His, Ile, Lys, Leu, Met, Asn, Gln, Arg, Ser, Thr or Val
  MOD_RES (12)...(12): Xaa = Ala, Asp, Phe, His, Ile, Lys, Leu, Met, Asn, Gln, Arg, Ser, Thr, Val or Tyr
  MOD_RES (13)...(13): Xaa = Ala, Asp, Glu, Phe, His, Leu, Met, Asn, Pro, Gln, Arg, Ser, Val or Tyr
  MOD_RES (14)...(14): Xaa = Ala, Asp, Glu, Phe, Gly, His, Leu, Asn, Arg, Ser, Thr, Val or Tyr
  MOD_RES (15)...(15): Xaa = Ala, Asp, Glu, Gly, Asn, Pro, Gln, Arg, Ser or Thr
  MOD_RES (16)...(16): Xaa = Ala, Asp, Glu, Phe, Gly, Lys, Leu, Asn, Pro, Gln, Arg, Ser or Thr
  MOD_RES (17)...(17): Xaa = Ala, Asp, Glu, Gly, Met, Asn, Arg, Ser, Thr, Val or Tyr
  MOD_RES (18)...(18): Xaa = Ala, Asp, Glu, Gly, Lys, Leu, Met, Gln, Arg, Ser or Thr
  MOD_RES (19)...(19): Xaa = Phe, His, Ile, Pro, Arg, Val, Trp or Tyr
  MOD_RES (20)...(20): Xaa = Ala, Glu, His, Lys, Leu, Gln, Ser, Thr, Val or Tyr
  MOD_RES (22)...(22): Xaa = Ala, Asp, Glu, Phe, Gly, His, Ile, Lys, Leu, Met, Asn, Pro, Gln, Arg, Ser, Thr, Val, Trp or Tyr
  MOD_RES (24)...(24): Xaa = Ala, Asp, Glu, Phe, Gly, His, Ile, Lys, Leu, Asn, Pro, Gln, Arg, Ser, Thr, Val or Tyr
  MOD_RES (25)...(25): Xaa = Ala, Asp, Glu, Phe, His, Ile, Lys, Leu, Met, Asn, Pro, Gln, Arg, Ser, Thr or Val
  MOD_RES (26)...(26): Xaa = Asp, Glu, Gly, Asn, Pro or Ser
  MOD_RES (27)...(27): Xaa = Ala, Asp, Glu, Phe, His, Leu, Met, Gln, Arg, Ser, Thr, Trp or Tyr
  MOD_RES (28)...(28): Xaa = Ala, Asp, Glu, Phe, Gly, His, Ile, Lys, Leu, Met, Asn, Gln, Arg, Ser, Thr, Val or Tyr
  MOD_RES (29)...(29): Xaa = Ala, Phe, Gly, Ile, Lys, Leu, Met, Pro, Gln, Arg, Ser, Thr, Val, Trp or Tyr
  MOD_RES (30)...(30): Xaa = Ala, Asp, Glu, Phe, Gly, His, Lys, Leu, Met, Asn, Pro, Gln, Arg, Ser, Thr, Val or Trp
  MOD_RES (31)...(31): Xaa = Ala, Asp, Glu, Gly, Ile, Lys, Leu, Met, Asn, Pro, Gln, Arg, Ser, Thr, Val or Tyr
  MOD_RES (32)...(32): Xaa = Ala, Asp, Glu, Phe, Gly, His, Ile, Lys, Leu, Met, Asn, Gln, Ser, Thr or Val
CXXXXCXXXXCXXXXXXXXXCXCXXXXXXXXXC

SEQ ID NO: 296 - protein, 34 aa, Artificial Sequence
  EGF domain monomer sequence
  MOD_RES (2)...(2): Xaa = Ala, Asp, Glu, Phe, Gly, His, Ile, Lys, Leu, Asn, Pro, Gln, Arg, Ser, Thr, Val or Trp
  MOD_RES (3)...(3): Xaa = Ala, Asp, Glu, Gly, His, Lys, Leu, Met, Asn, Pro, Arg, Ser, Thr or Tyr
  MOD_RES (4)...(4): Xaa = Ala, Asp, Glu, Gly, His, Lys, Leu, Met, Asn, Pro, Gln, Arg, Ser, Thr, Val or Trp
  MOD_RES (5)...(5): Xaa = Ala, Glu, Gly, Met, Asn, Pro, Gln, Arg, Ser, Thr or Tyr
  MOD_RES (7)...(7): Xaa = Ala, Asp, Glu, Phe, Gly, His, Ile, Lys, Leu, Met, Asn, Pro, Gln, Arg, Ser, Thr or Val
  MOD_RES (8)...(8): Xaa = Ala, Asp, Glu, Phe, Gly, His, Lys, Leu, Asn, Pro, Gln, Arg, Ser, Thr or Tyr
  MOD_RES (9)...(9): Xaa = Ala, Gly or Thr
  MOD_RES (10)...(10): Xaa = Ala, Asp, Glu, Phe, His, Ile, Lys, Leu, Met, Asn, Gln, Arg, Ser, Thr or Val
  MOD_RES (12)...(12): Xaa = Ala, Asp, Phe, His, Ile, Lys, Leu, Met, Asn, Gln, Arg, Ser, Thr, Val or Tyr
  MOD_RES (13)...(13): Xaa = Ala, Asp, Glu, Phe, His, Leu, Met, Asn, Pro, Gln, Arg, Ser, Val or Tyr
  MOD_RES (14)...(14): Xaa = Ala, Asp, Glu, Phe, Gly, His, Leu, Asn, Arg, Ser, Thr, Val or Tyr
  MOD_RES (15)...(15): Xaa = Ala, Asp, Glu, Gly, Asn, Pro, Gln, Arg, Ser or Thr
  MOD_RES (16)...(16): Xaa = Ala, Asp, Glu, Phe, Gly, Lys, Leu, Asn, Pro, Gln, Arg, Ser or Thr
  MOD_RES (17)...(17): Xaa = Ala, Asp, Glu, Gly, Met, Asn, Arg, Ser, Thr, Val or Tyr
  MOD_RES (18)...(18): Xaa = Ala, Asp, Glu, Gly, Lys, Leu, Met, Gln, Arg, Ser or Thr
  MOD_RES (19)...(19): Xaa = Phe, His, Ile, Pro, Arg, Val, Trp or Tyr
  MOD_RES (20)...(20): Xaa = Ala, Glu, His, Lys, Leu, Gln, Ser, Thr, Val or Tyr
  MOD_RES (22)...(22): Xaa = Ala, Asp, Glu, Phe, Gly, His, Ile, Lys, Leu, Met, Asn, Pro, Gln, Arg, Ser, Thr, Val, Trp or Tyr
  MOD_RES (24)...(24): Xaa = Ala, Asp, Glu, Phe, Gly, His, Ile, Lys, Leu, Asn, Pro, Gln, Arg, Ser, Thr, Val or Tyr
  MOD_RES (25)...(25): Xaa = Ala, Asp, Glu, Phe, His, Ile, Lys, Leu, Met, Asn, Pro, Gln, Arg, Ser, Thr or Val
  MOD_RES (26)...(26): Xaa = Asp, Glu, Gly, Asn, Pro or Ser
  MOD_RES (27)...(27): Xaa = Ala, Asp, Glu, Phe, His, Leu, Met, Gln, Arg, Ser, Thr, Trp or Tyr
  MOD_RES (28)...(28): Xaa = Ala, Asp, Glu, Phe, Gly, His, Ile, Lys, Leu, Met, Asn, Gln, Arg, Ser, Thr, Val or Tyr
  MOD_RES (29)...(29): Xaa = Ala, Phe, Gly, Ile, Lys, Leu, Met, Pro, Gln, Arg, Ser, Thr, Val, Trp or Tyr
  MOD_RES (30)...(30): Xaa = Ala, Asp, Glu, Phe, Gly, His, Lys, Leu, Met, Asn, Pro, Gln, Arg, Ser, Thr, Val or Trp
  MOD_RES (31)...(31): Xaa = Ala, Asp, Glu, Gly, Ile, Lys, Leu, Met, Asn, Pro, Gln, Arg, Ser, Thr, Val or Tyr
  MOD_RES (32)...(32): Xaa = Ala, Asp, Glu, Phe, Gly, His, Ile, Lys, Leu, Met, Asn, Gln, Ser, Thr or Val
  MOD_RES (33)...(33): Xaa = Glu, Phe, Gly, His, Ile, Lys, Leu, Met, Asn, Pro, Gln, Arg, Ser, Thr or Trp
CXXXXCXXXXCXXXXXXXXXCXCXXXXXXXXXXC

SEQ ID NO: 297 - protein, 35 aa, Artificial Sequence
  EGF domain monomer sequence
  MOD_RES (2)...(2): Xaa = Ala, Asp, Glu, Phe, Gly, His, Ile, Lys, Leu, Asn, Pro, Gln, Arg, Ser, Thr, Val or Trp
  MOD_RES (3)...(3): Xaa = Ala, Asp, Glu, Gly, His, Lys, Leu, Met, Asn, Pro, Arg, Ser, Thr or Tyr
  MOD_RES (4)...(4): Xaa = Ala, Asp, Glu, Gly, His, Lys, Leu, Met, Asn, Pro, Gln, Arg, Ser, Thr, Val or Trp
  MOD_RES (5)...(5): Xaa = Ala, Glu, Gly, Met, Asn, Pro, Gln, Arg, Ser, Thr or Tyr
  MOD_RES (7)...(7): Xaa = Ala, Asp, Glu, Phe, Gly, His, Ile, Lys, Leu, Met, Asn, Pro, Gln, Arg, Ser, Thr or Val
  MOD_RES (8)...(8): Xaa = Ala, Asp, Glu, Phe, Gly, His, Lys, Leu, Asn, Pro, Gln, Arg, Ser, Thr or Tyr
  MOD_RES (9)...(9): Xaa = Ala, Gly or Thr
  MOD_RES (10)...(10): Xaa = Ala, Asp, Glu, Phe, His, Ile, Lys, Leu, Met, Asn, Gln, Arg, Ser, Thr or Val
  MOD_RES (12)...(12): Xaa = Ala, Asp, Phe, His, Ile, Lys, Leu, Met, Asn, Gln, Arg, Ser, Thr, Val or Tyr
  MOD_RES (13)...(13): Xaa = Ala, Asp, Glu, Phe, His, Leu, Met, Asn, Pro, Gln, Arg, Ser, Val or Tyr
  MOD_RES (14)...(14): Xaa = Ala, Asp, Glu, Phe, Gly, His, Leu, Asn, Arg, Ser, Thr, Val or Tyr
  MOD_RES (15)...(15): Xaa = Ala, Asp, Glu, Gly, Asn, Pro, Gln, Arg, Ser or Thr
  MOD_RES (16)...(16): Xaa = Ala, Asp, Glu, Phe, Gly, Lys, Leu, Asn, Pro, Gln, Arg, Ser or Thr
  MOD_RES (17)...(17): Xaa = Ala, Asp, Glu, Gly, Met, Asn, Arg, Ser, Thr, Val or Tyr
  MOD_RES (18)...(18): Xaa = Ala, Asp, Glu, Gly, Lys, Leu, Met, Gln, Arg, Ser or Thr
  MOD_RES (19)...(19): Xaa = Phe, His, Ile, Pro, Arg, Val, Trp or Tyr
  MOD_RES (20)...(20): Xaa = Ala, Glu, His, Lys, Leu, Gln, Ser, Thr, Val or Tyr
  MOD_RES (22)...(22): Xaa = Ala, Asp, Glu, Phe, Gly, His, Ile, Lys, Leu, Met, Asn, Pro, Gln, Arg, Ser, Thr, Val, Trp or Tyr
  MOD_RES (24)...(24): Xaa = Ala, Asp, Glu, Phe, Gly, His, Ile, Lys, Leu, Asn, Pro, Gln, Arg, Ser, Thr, Val or Tyr
  MOD_RES (25)...(25): Xaa = Ala, Asp, Glu, Phe, His, Ile, Lys, Leu, Met, Asn, Pro, Gln, Arg, Ser, Thr or Val
  MOD_RES (26)...(26): Xaa = Asp, Glu, Gly, Asn, Pro or Ser
  MOD_RES (27)...(27): Xaa = Ala, Asp, Glu, Phe, His, Leu, Met, Gln, Arg, Ser, Thr, Trp or Tyr
  MOD_RES (28)...(28): Xaa = Ala, Asp, Glu, Phe, Gly, His, Ile, Lys, Leu, Met, Asn, Gln, Arg, Ser, Thr, Val or Tyr
  MOD_RES (29)...(29): Xaa = Ala, Phe, Gly, Ile, Lys, Leu, Met, Pro, Gln, Arg, Ser, Thr, Val, Trp or Tyr
  MOD_RES (30)...(30): Xaa = Ala, Asp, Glu, Phe, Gly, His, Lys, Leu, Met, Asn, Pro, Gln, Arg, Ser, Thr, Val or Trp
  MOD_RES (31)...(31): Xaa = Ala, Asp, Glu, Gly, Ile, Lys, Leu, Met, Asn, Pro, Gln, Arg, Ser, Thr, Val or Tyr
  MOD_RES (32)...(32): Xaa = Ala, Asp, Glu, Phe, Gly, His, Ile, Lys, Leu, Met, Asn, Gln, Ser, Thr or Val
  MOD_RES (33)...(33): Xaa = Glu, Phe, Gly, His, Ile, Lys, Leu, Met, Asn, Pro, Gln, Arg, Ser, Thr or Trp
  MOD_RES (34)...(34): Xaa = Ala, Asp, Glu, Phe, Gly, His, Lys, Leu, Met, Asn, Pro, Gln, Arg, Ser, Thr, Val or Tyr
CXXXXCXXXXCXXXXXXXXXCXCXXXXXXXXXXXC

SEQ ID NO: 298 - protein, 36 aa, Artificial Sequence
  EGF domain monomer sequence
  MOD_RES (2)...(2): Xaa = Ala, Asp, Glu, Phe, Gly, His, Ile, Lys, Leu, Asn, Pro, Gln, Arg, Ser, Thr, Val or Trp
  MOD_RES (3)...(3): Xaa = Ala, Asp, Glu, Gly, His, Lys, Leu, Met, Asn, Pro, Arg, Ser, Thr or Tyr
  MOD_RES (4)...(4): Xaa = Ala, Asp, Glu, Gly, His, Lys, Leu, Met, Asn, Pro, Gln, Arg, Ser, Thr, Val or Trp
  MOD_RES (5)...(5): Xaa = Ala, Glu, Gly, Met, Asn, Pro, Gln, Arg, Ser, Thr or Tyr
  MOD_RES (7)...(7): Xaa = Ala, Asp, Glu, Phe, Gly, His, Ile, Lys, Leu, Met, Asn, Pro, Gln, Arg, Ser, Thr or Val
  MOD_RES (8)...(8): Xaa = Ala, Asp, Glu, Phe, Gly, His, Lys, Leu, Asn, Pro, Gln, Arg, Ser, Thr or Tyr
  MOD_RES (9)...(9): Xaa = Ala, Gly or Thr
  MOD_RES (10)...(10): Xaa = Ala, Asp, Glu, Phe, His, Ile, Lys, Leu, Met, Asn, Gln, Arg, Ser, Thr or Val
  MOD_RES (12)...(12): Xaa = Ala, Asp, Phe, His, Ile, Lys, Leu, Met, Asn, Gln, Arg, Ser, Thr, Val or Tyr
  MOD_RES (13)...(13): Xaa = Ala, Asp, Glu, Phe, His, Leu, Met, Asn, Pro, Gln, Arg, Ser, Val or Tyr
  MOD_RES (14)...(14): Xaa = Ala, Asp, Glu, Phe, Gly, His, Leu, Asn, Arg, Ser, Thr, Val or Tyr
  MOD_RES (15)...(15): Xaa = Ala, Asp, Glu, Gly, Asn, Pro, Gln, Arg, Ser or Thr
  MOD_RES (16)...(16): Xaa = Ala, Asp, Glu, Phe, Gly, Lys, Leu, Asn, Pro, Gln, Arg, Ser or Thr
  MOD_RES (17)...(17): Xaa = Ala, Asp, Glu, Gly, Met, Asn, Arg, Ser, Thr, Val or Tyr
  MOD_RES (18)...(18): Xaa = Ala, Asp, Glu, Gly, Lys, Leu, Met, Gln, Arg, Ser or Thr
  MOD_RES (19)...(19): Xaa = Phe, His, Ile, Pro, Arg, Val, Trp or Tyr
  MOD_RES (20)...(20): Xaa = Ala, Glu, His, Lys, Leu, Gln, Ser, Thr, Val or Tyr
  MOD_RES (22)...(22): Xaa = Ala, Asp, Glu, Phe, Gly, His, Ile, Lys, Leu, Met, Asn, Pro, Gln, Arg, Ser, Thr, Val, Trp or Tyr
  MOD_RES (24)...(24): Xaa = Ala, Asp, Glu, Phe, Gly, His, Ile, Lys, Leu, Asn, Pro, Gln, Arg, Ser, Thr, Val or Tyr
  MOD_RES (25)...(25): Xaa = Ala, Asp, Glu, Phe, His, Ile, Lys, Leu, Met, Asn, Pro, Gln, Arg, Ser, Thr or Val
  MOD_RES (26)...(26): Xaa = Asp, Glu, Gly, Asn, Pro or Ser
  MOD_RES (27)...(27): Xaa = Ala, Asp, Glu, Phe, His, Leu, Met, Gln, Arg, Ser, Thr, Trp or Tyr
  MOD_RES (28)...(28): Xaa = Ala, Asp, Glu, Phe, Gly, His, Ile, Lys, Leu, Met, Asn, Gln, Arg, Ser, Thr, Val or Tyr
  MOD_RES (29)...(29): Xaa = Ala, Phe, Gly, Ile, Lys, Leu, Met, Pro, Gln, Arg, Ser, Thr, Val, Trp or Tyr
  MOD_RES (30)...(30): Xaa = Ala, Asp, Glu, Phe, Gly, His, Lys, Leu, Met, Asn, Pro, Gln, Arg, Ser, Thr, Val or Trp
  MOD_RES (31)...(31): Xaa = Ala, Asp, Glu, Gly, Ile, Lys, Leu, Met, Asn, Pro, Gln, Arg, Ser, Thr, Val or Tyr
  MOD_RES (32)...(32): Xaa = Ala, Asp, Glu, Phe, Gly, His, Ile, Lys, Leu, Met, Asn, Gln, Ser, Thr or Val
  MOD_RES (33)...(33): Xaa = Glu, Phe, Gly, His, Ile, Lys, Leu, Met, Asn, Pro, Gln, Arg, Ser, Thr or Trp
  MOD_RES (34)...(34): Xaa = Ala, Asp, Glu, Phe, Gly, His, Lys, Leu, Met, Asn, Pro, Gln, Arg, Ser, Thr, Val or Tyr
  MOD_RES (35)...(35): Xaa = Ala, Asp, Glu, Phe, Gly, His, Ile, Lys, Met, Asn, Gln, Arg, Ser, Thr, Val or Tyr
CXXXXCXXXXCXXXXXXXXXCXCXXXXXXXXXXXXC

SEQ ID NO: 299 - protein, 33 aa, Artificial Sequence
  EGF domain monomer sequence
  MOD_RES (2)...(2): Xaa = Ala, Asp, Glu, Phe, Gly, His, Ile, Lys, Leu, Asn, Pro, Gln, Arg, Ser, Thr, Val or Trp
  MOD_RES (3)...(3): Xaa = Ala, Asp, Glu, Gly, His, Lys, Leu, Met, Asn, Pro, Arg, Ser, Thr or Tyr
  MOD_RES (4)...(4): Xaa = Ala, Asp, Glu, Gly, His, Lys, Leu, Met, Asn, Pro, Gln, Arg, Ser, Thr, Val or Trp
  MOD_RES (5)...(5): Xaa = Ala, Glu, Gly, Met, Asn, Pro, Gln, Arg, Ser, Thr or Tyr
  MOD_RES (7)...(7): Xaa = Ala, Cys, Asp, Glu, Phe, Gly, His, Lys, Leu, Met, Asn, Pro, Gln, Arg, Ser, Val or Tyr
  MOD_RES (8)...(8): Xaa = Ala, Asp, Glu, Gly, His, Ile, Lys, Leu, Met, Asn, Pro, Gln, Arg, Ser, Thr, Val or Tyr
  MOD_RES (9)...(9): Xaa = Ala, Asp, Glu, Phe, Gly, His, Lys, Leu, Asn, Gln, Arg, Ser, Thr or Tyr
  MOD_RES (10)...(10): Xaa = Ala, Phe, Gly, His, Gln, Ser, Thr or Val
  MOD_RES (11)...(11): Xaa = Ala, Asp, Glu, Phe, His, Ile, Lys, Leu, Met, Asn, Gln, Arg, Ser, Thr or Val
  MOD_RES (13)...(13): Xaa = Ala, Asp, Phe, His, Ile, Lys, Leu, Met, Asn, Gln, Arg, Ser, Thr, Val or Tyr
  MOD_RES (14)...(14): Xaa = Ala, Asp, Glu, Phe, His, Leu, Met, Asn, Pro, Gln, Arg, Ser, Val or Tyr
  MOD_RES (15)...(15): Xaa = Ala, Asp, Glu, Phe, Gly, His, Leu, Asn, Arg, Ser, Thr, Val or Tyr
  MOD_RES (16)...(16): Xaa = Ala, Asp, Glu, Gly, Asn, Pro, Gln, Arg, Ser or Thr
  MOD_RES (17)...(17): Xaa = Ala, Asp, Glu, Phe, Gly, Lys, Leu, Asn, Pro, Gln, Arg, Ser or Thr
  MOD_RES (18)...(18): Xaa = Ala, Asp, Glu, Gly, Met, Asn, Arg, Ser, Thr, Val or Tyr
  MOD_RES (19)...(19): Xaa = Ala, Asp, Glu, Gly, Lys, Leu, Met, Gln, Arg, Ser or Thr
  MOD_RES (20)...(20): Xaa = Phe, His, Ile, Pro, Arg, Val, Trp or Tyr
  MOD_RES (21)...(21): Xaa = Ala, Glu, His, Lys, Leu, Gln, Ser, Thr, Val or Tyr
  MOD_RES (23)...(23): Xaa = Ala, Asp, Glu, Phe, Gly, His, Ile, Lys, Leu, Met, Asn, Pro, Gln, Arg, Ser, Thr, Val, Trp or Tyr
  MOD_RES (25)...(25): Xaa = Ala, Asp, Glu, Phe, His, Lys, Leu, Met, Asn, Pro, Gln, Arg, Ser, Thr, Val, Trp or Tyr
  MOD_RES (26)...(26): Xaa = Ala, Asp, Glu, Phe, Gly, His, Lys, Leu, Asn, Pro, Gln, Arg, Ser, Thr, Val or Tyr
  MOD_RES (27)...(27): Xaa = Ala, Glu, Gly, His, Lys, Leu, Asn, Pro, Arg, Ser, Thr or Tyr
  MOD_RES (28)...(28): Xaa = Phe, His, Ile, Leu, Met, Arg, Thr, Trp or Tyr
  MOD_RES (29)...(29): Xaa = Ala, Asp, Glu, Phe, Gly, His, Ile, Lys, Leu, Met, Asn, Gln, Arg, Ser, Thr, Val or Tyr
  MOD_RES (30)...(30): Xaa = Asp, Gly or Ser
  MOD_RES (31)...(31): Xaa = Ala, Asp, Glu, Phe, His, Ile, Lys, Leu, Asn, Pro, Gln, Arg, Ser, Thr, Val or Tyr
  MOD_RES (32)...(32): Xaa = Ala, Asp, Glu, Phe, His, Ile, Lys, Leu, Met, Asn, Gln, Arg, Ser, Thr or Tyr
CXXXXCXXXXXCXXXXXXXXXCXCXXXXXXXXC

SEQ ID NO: 300 - protein, 34 aa, Artificial Sequence
  EGF domain monomer sequence
  MOD_RES (2)...(2): Xaa = Ala, Asp, Glu, Phe, Gly, His, Ile, Lys, Leu, Asn, Pro, Gln, Arg, Ser, Thr, Val or Trp
  MOD_RES (3)...(3): Xaa = Ala, Asp, Glu, Gly, His, Lys, Leu, Met, Asn, Pro, Arg, Ser, Thr or Tyr
  MOD_RES (4)...(4): Xaa = Ala, Asp, Glu, Gly, His, Lys, Leu, Met, Asn, Pro, Gln, Arg, Ser, Thr, Val or Trp
  MOD_RES (5)...(5): Xaa = Ala, Glu, Gly, Met, Asn, Pro, Gln, Arg, Ser, Thr or Tyr
  MOD_RES (7)...(7): Xaa = Ala, Cys, Asp, Glu, Phe, Gly, His, Lys, Leu, Met, Asn, Pro, Gln, Arg, Ser, Val or Tyr
  MOD_RES (8)...(8): Xaa = Ala, Asp, Glu, Gly, His, Ile, Lys, Leu, Met, Asn, Pro, Gln, Arg, Ser, Thr, Val or Tyr
  MOD_RES (9)...(9): Xaa = Ala, Asp, Glu, Phe, Gly, His, Lys, Leu, Asn, Gln, Arg, Ser, Thr or Tyr
  MOD_RES (10)...(10): Xaa = Ala, Phe, Gly, His, Gln, Ser, Thr or Val
  MOD_RES (11)...(11): Xaa = Ala, Asp, Glu, Phe, His, Ile, Lys, Leu, Met, Asn, Gln, Arg, Ser, Thr or Val
  MOD_RES (13)...(13): Xaa = Ala, Asp, Phe, His, Ile, Lys, Leu, Met, Asn, Gln, Arg, Ser, Thr, Val or Tyr
  MOD_RES (14)...(14): Xaa = Ala, Asp, Glu, Phe, His, Leu, Met, Asn, Pro, Gln, Arg, Ser, Val or Tyr
  MOD_RES (15)...(15): Xaa = Ala, Asp, Glu, Phe, Gly, His, Leu, Asn, Arg, Ser, Thr, Val or Tyr
  MOD_RES (16)...(16): Xaa = Ala, Asp, Glu, Gly, Asn, Pro, Gln, Arg, Ser or Thr
  MOD_RES (17)...(17): Xaa = Ala, Asp, Glu, Phe, Gly, Lys, Leu, Asn, Pro, Gln, Arg, Ser or Thr
  MOD_RES (18)...(18): Xaa = Ala, Asp, Glu, Gly, Met, Asn, Arg, Ser, Thr, Val or Tyr
  MOD_RES (19)...(19): Xaa = Ala, Asp, Glu, Gly, Lys, Leu, Met, Gln, Arg, Ser or Thr
  MOD_RES (20)...(20): Xaa = Phe, His, Ile, Pro, Arg, Val, Trp or Tyr
  MOD_RES (21)...(21): Xaa = Ala, Glu, His, Lys, Leu, Gln, Ser, Thr, Val or Tyr
  MOD_RES (23)...(23): Xaa = Ala, Asp, Glu, Phe, Gly, His, Ile, Lys, Leu, Met, Asn, Pro, Gln, Arg, Ser, Thr, Val, Trp or Tyr
  MOD_RES (25)...(25): Xaa = Ala, Asp, Glu, Phe, Gly, His, Ile, Lys, Leu, Asn, Pro, Gln, Arg, Ser, Thr, Val or Tyr
  MOD_RES (26)...(26): Xaa = Ala, Asp, Glu, Phe, His, Ile, Lys, Leu, Met, Asn, Pro, Gln, Arg, Ser, Thr or Val
  MOD_RES (27)...(27): Xaa = Asp, Glu, Gly, Asn, Pro or Ser
  MOD_RES (28)...(28): Xaa = Ala, Asp, Glu, Phe, His, Leu, Met, Gln, Arg, Ser, Thr, Trp or Tyr
  MOD_RES (29)...(29): Xaa = Ala, Asp, Glu, Phe, Gly, His, Ile, Lys, Leu, Met, Asn, Gln, Arg, Ser, Thr, Val or Tyr
  MOD_RES (30)...(30): Xaa = Ala, Phe, Gly, Ile, Lys, Leu, Met, Pro, Gln, Arg, Ser, Thr, Val, Trp or Tyr
  MOD_RES (31)...(31): Xaa = Ala, Asp, Glu, Phe, Gly, His, Lys, Leu, Met, Asn, Pro, Gln, Arg, Ser, Thr, Val or Trp
  MOD_RES (32)...(32): Xaa = Ala, Asp, Glu, Gly, Ile, Lys, Leu, Met, Asn, Pro, Gln, Arg, Ser, Thr, Val or Tyr
  MOD_RES (33)...(33): Xaa = Ala, Asp, Glu, Phe, Gly, His, Ile, Lys, Leu, Met, Asn, Gln, Ser, Thr or Val
CXXXXCXXXXXCXXXXXXXXXCXCXXXXXXXXXC

SEQ ID NO: 301 - protein, 35 aa, Artificial Sequence
  EGF domain monomer sequence
  MOD_RES (2)...(2): Xaa = Ala, Asp, Glu, Phe, Gly, His, Ile, Lys, Leu, Asn, Pro, Gln, Arg, Ser, Thr, Val or Trp
  MOD_RES (3)...(3): Xaa = Ala, Asp, Glu, Gly, His, Lys, Leu, Met, Asn, Pro, Arg, Ser, Thr or Tyr
  MOD_RES (4)...(4): Xaa = Ala, Asp, Glu, Gly, His, Lys, Leu, Met, Asn, Pro, Gln, Arg, Ser, Thr, Val or Trp
  MOD_RES (5)...(5): Xaa = Ala, Glu, Gly, Met, Asn, Pro, Gln, Arg, Ser, Thr or Tyr
  MOD_RES (7)...(7): Xaa = Ala, Cys, Asp, Glu, Phe, Gly, His, Lys, Leu, Met, Asn, Pro, Gln, Arg, Ser, Val or Tyr
  MOD_RES (8)...(8): Xaa = Ala, Asp, Glu, Gly, His, Ile, Lys, Leu, Met, Asn, Pro, Gln, Arg, Ser, Thr, Val or Tyr
  MOD_RES (9)...(9): Xaa = Ala, Asp, Glu, Phe, Gly, His, Lys, Leu, Asn, Gln, Arg, Ser, Thr or Tyr
  MOD_RES (10)...(10): Xaa = Ala, Phe, Gly, His, Gln, Ser, Thr or Val
  MOD_RES (11)...(11): Xaa = Ala, Asp, Glu, Phe, His, Ile, Lys, Leu, Met, Asn, Gln, Arg, Ser, Thr or Val
  MOD_RES (13)...(13): Xaa = Ala, Asp, Phe, His, Ile, Lys, Leu, Met, Asn, Gln, Arg, Ser, Thr, Val or Tyr
  MOD_RES (14)...(14): Xaa = Ala, Asp, Glu, Phe, His, Leu, Met, Asn, Pro, Gln, Arg, Ser, Val or Tyr
  MOD_RES (15)...(15): Xaa = Ala, Asp, Glu, Phe, Gly, His, Leu, Asn, Arg, Ser, Thr, Val or Tyr
  MOD_RES (16)...(16): Xaa = Ala, Asp, Glu, Gly, Asn, Pro, Gln, Arg, Ser or Thr
  MOD_RES (17)...(17): Xaa = Ala, Asp, Glu, Phe, Gly, Lys, Leu, Asn, Pro, Gln, Arg, Ser or Thr
  MOD_RES (18)...(18): Xaa = Ala, Asp, Glu, Gly, Met, Asn, Arg, Ser, Thr, Val or Tyr
  MOD_RES (19)...(19): Xaa = Ala, Asp, Glu, Gly, Lys, Leu, Met, Gln, Arg, Ser or Thr
  MOD_RES (20)...(20): Xaa = Phe, His, Ile, Pro, Arg, Val, Trp or Tyr
  MOD_RES (21)...(21): Xaa = Ala, Glu, His, Lys, Leu, Gln, Ser, Thr, Val or Tyr
  MOD_RES (23)...(23): Xaa = Ala, Asp, Glu, Phe, Gly, His, Ile, Lys, Leu, Met, Asn, Pro, Gln, Arg, Ser, Thr, Val, Trp or Tyr
  MOD_RES (25)...(25): Xaa = Ala, Asp, Glu, Phe, Gly, His, Ile, Lys, Leu, Asn, Pro, Gln, Arg, Ser, Thr, Val or Tyr
  MOD_RES (26)...(26): Xaa = Ala, Asp, Glu, Phe, His, Ile, Lys, Leu, Met, Asn, Pro, Gln, Arg, Ser, Thr or Val
  MOD_RES (27)...(27): Xaa = Asp, Glu, Gly, Asn, Pro or Ser
  MOD_RES (28)...(28): Xaa = Ala, Asp, Glu, Phe, His, Leu, Met, Gln, Arg, Ser, Thr, Trp or Tyr
  MOD_RES (29)...(29): Xaa = Ala, Asp, Glu, Phe, Gly, His, Ile, Lys, Leu, Met, Asn, Gln, Arg, Ser, Thr, Val or Tyr
  MOD_RES (30)...(30): Xaa = Ala, Phe, Gly, Ile, Lys, Leu, Met, Pro, Gln, Arg, Ser, Thr, Val, Trp or Tyr
  MOD_RES (31)...(31): Xaa = Ala, Asp, Glu, Phe, Gly, His, Lys, Leu, Met, Asn, Pro, Gln, Arg, Ser, Thr, Val or Trp
  MOD_RES (32)...(32): Xaa = Ala, Asp, Glu, Gly, Ile, Lys, Leu, Met, Asn, Pro, Gln, Arg, Ser, Thr, Val or Tyr
  MOD_RES (33)...(33): Xaa = Ala, Asp, Glu, Phe, Gly, His, Ile, Lys, Leu, Met, Asn, Gln, Ser, Thr or Val
  MOD_RES (34)...(34): Xaa = Glu, Phe, Gly, His, Ile, Lys, Leu, Met, Asn, Pro, Gln, Arg, Ser, Thr or Trp
CXXXXCXXXXXCXXXXXXXXXCXCXXXXXXXXXXC

SEQ ID NO: 302 - protein, 36 aa, Artificial Sequence
  EGF domain monomer sequence
  MOD_RES (2)...(2): Xaa = Ala, Asp, Glu, Phe, Gly, His, Ile, Lys, Leu, Asn, Pro, Gln, Arg, Ser, Thr, Val or Trp
  MOD_RES (3)...(3): Xaa = Ala, Asp, Glu, Gly, His, Lys, Leu, Met, Asn, Pro, Arg, Ser, Thr or Tyr
  MOD_RES (4)...(4): Xaa = Ala, Asp, Glu, Gly, His, Lys, Leu, Met, Asn, Pro, Gln, Arg, Ser, Thr, Val or Trp
  MOD_RES (5)...(5): Xaa = Ala, Glu, Gly, Met, Asn, Pro, Gln, Arg, Ser, Thr or Tyr
  MOD_RES (7)...(7): Xaa = Ala, Cys, Asp, Glu, Phe, Gly, His, Lys, Leu, Met, Asn, Pro, Gln, Arg, Ser, Val or Tyr
  MOD_RES (8)...(8): Xaa = Ala, Asp, Glu, Gly, His, Ile, Lys, Leu, Met, Asn, Pro, Gln, Arg, Ser, Thr, Val or Tyr
  MOD_RES (9)...(9): Xaa = Ala, Asp, Glu, Phe, Gly, His, Lys, Leu, Asn, Gln, Arg, Ser, Thr or Tyr
  MOD_RES (10)...(10): Xaa = Ala, Phe, Gly, His, Gln, Ser, Thr or Val
  MOD_RES (11)...(11): Xaa = Ala, Asp, Glu, Phe, His, Ile, Lys, Leu, Met, Asn, Gln, Arg, Ser, Thr or Val
  MOD_RES (13)...(13): Xaa = Ala, Asp, Phe, His, Ile, Lys, Leu, Met, Asn, Gln, Arg, Ser, Thr, Val or Tyr
  MOD_RES (14)...(14): Xaa = Ala, Asp, Glu, Phe, His, Leu, Met, Asn, Pro, Gln, Arg, Ser, Val or Tyr
  MOD_RES (15)...(15): Xaa = Ala, Asp, Glu, Phe, Gly, His, Leu, Asn, Arg, Ser, Thr, Val or Tyr
  MOD_RES (16)...(16): Xaa = Ala, Asp, Glu, Gly, Asn, Pro, Gln, Arg, Ser or Thr
  MOD_RES (17)...(17): Xaa = Ala, Asp, Glu, Phe, Gly, Lys, Leu, Asn, Pro, Gln, Arg, Ser or Thr
  MOD_RES (18)...(18): Xaa = Ala, Asp, Glu, Gly, Met, Asn, Arg, Ser, Thr, Val or Tyr
  MOD_RES (19)...(19): Xaa = Ala, Asp, Glu, Gly, Lys, Leu, Met, Gln, Arg, Ser or Thr
  MOD_RES (20)...(20): Xaa = Phe, His, Ile, Pro, Arg, Val, Trp or Tyr
  MOD_RES (21)...(21): Xaa = Ala, Glu, His, Lys, Leu, Gln, Ser, Thr, Val or Tyr
  MOD_RES (23)...(23): Xaa = Ala, Asp, Glu, Phe, Gly, His, Ile, Lys, Leu, Met, Asn, Pro, Gln, Arg, Ser, Thr, Val, Trp or Tyr
  MOD_RES (25)...(25): Xaa = Ala, Asp, Glu, Phe, Gly, His, Ile, Lys, Leu, Asn, Pro, Gln, Arg, Ser, Thr, Val or Tyr
  MOD_RES (26)...(26): Xaa = Ala, Asp, Glu, Phe, His, Ile, Lys, Leu, Met, Asn, Pro, Gln, Arg, Ser, Thr or Val
  MOD_RES (27)...(27): Xaa = Asp, Glu, Gly, Asn, Pro or Ser
  MOD_RES (28)...(28): Xaa = Ala, Asp, Glu, Phe, His, Leu, Met, Gln, Arg, Ser, Thr, Trp or Tyr
  MOD_RES (29)...(29): Xaa = Ala, Asp, Glu, Phe, Gly, His, Ile, Lys, Leu, Met, Asn, Gln, Arg, Ser, Thr, Val or Tyr
  MOD_RES (30)...(30): Xaa = Ala, Phe, Gly, Ile, Lys, Leu, Met, Pro, Gln, Arg, Ser, Thr, Val, Trp or Tyr
  MOD_RES (31)...(31): Xaa = Ala, Asp, Glu, Phe, Gly, His, Lys, Leu, Met, Asn, Pro, Gln, Arg, Ser, Thr, Val or Trp
  MOD_RES (32)...(32): Xaa = Ala, Asp, Glu, Gly, Ile, Lys, Leu, Met, Asn, Pro, Gln, Arg, Ser, Thr, Val or Tyr
  MOD_RES (33)...(33): Xaa = Ala, Asp, Glu, Phe, Gly, His, Ile, Lys, Leu, Met, Asn, Gln, Ser, Thr or Val
  MOD_RES (34)...(34): Xaa = Glu, Phe, Gly, His, Ile, Lys, Leu, Met, Asn, Pro, Gln, Arg, Ser, Thr or Trp
  MOD_RES (35)...(35): Xaa = Ala, Asp, Glu, Phe, Gly, His, Lys, Leu, Met, Asn, Pro, Gln, Arg, Ser, Thr, Val or Tyr
CXXXXCXXXXXCXXXXXXXXXCXCXXXXXXXXXXXC

SEQ ID NO: 303 - protein, 37 aa, Artificial Sequence
  EGF domain monomer sequence
  MOD_RES (2)...(2): Xaa = Ala, Asp, Glu, Phe, Gly, His, Ile, Lys, Leu, Asn, Pro, Gln, Arg, Ser, Thr, Val or Trp
  MOD_RES (3)...(3): Xaa = Ala, Asp, Glu, Gly, His, Lys, Leu, Met, Asn, Pro, Arg, Ser, Thr or Tyr
  MOD_RES (4)...(4): Xaa = Ala, Asp, Glu, Gly, His, Lys, Leu, Met, Asn, Pro, Gln, Arg, Ser, Thr, Val or Trp
  MOD_RES (5)...(5): Xaa = Ala, Glu, Gly, Met, Asn, Pro, Gln, Arg, Ser, Thr or Tyr
  MOD_RES (7)...(7): Xaa = Ala, Cys, Asp, Glu, Phe, Gly, His, Lys, Leu, Met, Asn, Pro, Gln, Arg, Ser, Val or Tyr
  MOD_RES (8)...(8): Xaa = Ala, Asp, Glu, Gly, His, Ile, Lys, Leu, Met, Asn, Pro, Gln, Arg, Ser, Thr, Val or Tyr
  MOD_RES (9)...(9): Xaa = Ala, Asp, Glu, Phe, Gly, His, Lys, Leu, Asn, Gln, Arg, Ser, Thr or Tyr
  MOD_RES (10)...(10): Xaa = Ala, Phe, Gly, His, Gln, Ser, Thr or Val
  MOD_RES (11)...(11): Xaa = Ala, Asp, Glu, Phe, His, Ile, Lys, Leu, Met, Asn, Gln, Arg, Ser, Thr or Val
  MOD_RES (13)...(13): Xaa = Ala, Asp, Phe, His, Ile, Lys, Leu, Met, Asn, Gln, Arg, Ser, Thr, Val or Tyr
  MOD_RES (14)...(14): Xaa = Ala, Asp, Glu, Phe, His, Leu, Met, Asn, Pro, Gln, Arg, Ser, Val or Tyr
  MOD_RES (15)...(15): Xaa = Ala, Asp, Glu, Phe, Gly, His, Leu, Asn, Arg, Ser, Thr, Val or Tyr
  MOD_RES (16)...(16): Xaa = Ala, Asp, Glu, Gly, Asn, Pro, Gln, Arg, Ser or Thr
  MOD_RES (17)...(17): Xaa = Ala, Asp, Glu, Phe, Gly, Lys, Leu, Asn, Pro, Gln, Arg, Ser or Thr
  MOD_RES (18)...(18): Xaa = Ala, Asp, Glu, Gly, Met, Asn, Arg, Ser, Thr, Val or Tyr
  MOD_RES (19)...(19): Xaa = Ala, Asp, Glu, Gly, Lys, Leu, Met, Gln, Arg, Ser or Thr
  MOD_RES (20)...(20): Xaa = Phe, His, Ile, Pro, Arg, Val, Trp or Tyr
  MOD_RES (21)...(21): Xaa = Ala, Glu, His, Lys, Leu, Gln, Ser, Thr, Val or Tyr
  MOD_RES (23)...(23): Xaa = Ala, Asp, Glu, Phe, Gly, His, Ile, Lys, Leu, Met, Asn, Pro, Gln, Arg, Ser, Thr, Val, Trp or Tyr
  MOD_RES (25)...(25): Xaa = Ala, Asp, Glu, Phe, Gly, His, Ile, Lys, Leu, Asn, Pro, Gln, Arg, Ser, Thr, Val or Tyr
  MOD_RES (26)...(26): Xaa = Ala, Asp, Glu, Phe, His, Ile, Lys, Leu, Met, Asn, Pro, Gln, Arg, Ser, Thr or Val
  MOD_RES (27)...(27): Xaa = Asp, Glu, Gly, Asn, Pro or Ser
  MOD_RES (28)...(28): Xaa = Ala, Asp, Glu, Phe, His, Leu, Met, Gln, Arg, Ser, Thr, Trp or Tyr
  MOD_RES (29)...(29): Xaa = Ala, Asp, Glu, Phe, Gly, His, Ile, Lys, Leu, Met, Asn, Gln, Arg, Ser, Thr, Val or Tyr
  MOD_RES (30)...(30): Xaa = Ala, Phe, Gly, Ile, Lys, Leu, Met, Pro, Gln, Arg, Ser, Thr, Val, Trp or Tyr
  MOD_RES (31)...(31): Xaa = Ala, Asp, Glu, Phe, Gly, His, Lys, Leu, Met, Asn, Pro, Gln, Arg, Ser, Thr, Val or Trp
  MOD_RES (32)...(32): Xaa = Ala, Asp, Glu, Gly, Ile, Lys, Leu, Met, Asn, Pro, Gln, Arg, Ser, Thr, Val or Tyr
  MOD_RES (33)...(33): Xaa = Ala, Asp, Glu, Phe, Gly, His, Ile, Lys, Leu, Met, Asn, Gln, Ser, Thr or Val
  MOD_RES (34)...(34): Xaa = Glu, Phe, Gly, His, Ile, Lys, Leu, Met, Asn, Pro, Gln, Arg, Ser, Thr or Trp
  MOD_RES (35)...(35): Xaa = Ala, Asp, Glu, Phe, Gly, His, Lys, Leu, Met, Asn, Pro, Gln, Arg, Ser, Thr, Val or Tyr
  MOD_RES (36)...(36): Xaa = Ala, Asp, Glu, Phe, Gly, His, Ile, Lys, Met, Asn, Gln, Arg, Ser, Thr, Val or Tyr
CXXXXCXXXXXCXXXXXXXXXCXCXXXXXXXXXXXXC

SEQ ID NO: 304 - protein, 33 aa, Artificial Sequence
  EGF domain monomer sequence
  MOD_RES (2)...(2): Xaa = Ala, Asp, Glu, Gly, Ile, Lys, Leu, Gln, Arg, Ser, Thr or Val
  MOD_RES (3)...(3): Xaa = Ala, Asp, Glu, Phe, Gly, His, Ile, Lys, Leu, Met, Asn, Pro, Gln, Arg, Ser, Thr or Val
  MOD_RES (4)...(4): Xaa = Ala, Glu, Phe, Gly, His, Leu, Asn, Pro, Gln, Arg, Ser, Thr, Trp or Tyr
  MOD_RES (5)...(5): Xaa = Ala, Asp, Glu, Phe, Gly, His, Ile, Lys, Leu, Asn, Pro, Arg, Ser or Thr
  MOD_RES (6)...(6): Xaa = Ala, Phe, Gly, Ile, Lys, Leu, Met, Asn, Pro, Gln, Arg, Ser, Thr, Val or Tyr
  MOD_RES (8)...(8): Xaa = Ala, Asp, Glu, Phe, Gly, His, Ile, Lys, Leu, Met, Asn, Pro, Gln, Arg, Ser, Thr or Val
  MOD_RES (9)...(9): Xaa = Ala, Asp, Glu, Phe, Gly, His, Lys, Leu, Asn, Pro, Gln, Arg, Ser, Thr or Tyr
  MOD_RES (10)...(10): Xaa = Ala, Gly or Thr
  MOD_RES (11)...(11): Xaa = Ala, Asp, Glu, Phe, His, Ile, Lys, Leu, Met, Asn, Gln, Arg, Ser, Thr or Val
  MOD_RES (13)...(13): Xaa = Ala, Asp, Phe, His, Ile, Lys, Leu, Met, Asn, Gln, Arg, Ser, Thr, Val or Tyr
  MOD_RES (14)...(14): Xaa = Ala, Asp, Glu, Phe, His, Leu, Met, Asn, Pro, Gln, Arg, Ser, Val or Tyr
  MOD_RES (15)...(15): Xaa = Ala, Asp, Glu, Phe, Gly, His, Leu, Asn, Arg, Ser, Thr, Val or Tyr
  MOD_RES (16)...(16): Xaa = Ala, Asp, Glu, Gly, Asn, Pro, Gln, Arg, Ser or Thr
  MOD_RES (17)...(17): Xaa = Ala, Asp, Glu, Phe, Gly, Lys, Leu, Asn, Pro, Gln, Arg, Ser or Thr
  MOD_RES (18)...(18): Xaa = Ala, Asp, Glu, Gly, Met, Asn, Arg, Ser, Thr, Val or Tyr
  MOD_RES (19)...(19): Xaa = Ala, Asp, Glu, Gly, Lys, Leu, Met, Gln, Arg, Ser or Thr
  MOD_RES (20)...(20): Xaa = Phe, His, Ile, Pro, Arg, Val, Trp or Tyr
  MOD_RES (21)...(21): Xaa = Ala, Glu, His, Lys, Leu, Gln, Ser, Thr, Val or Tyr
  MOD_RES (23)...(23): Xaa = Ala, Asp, Glu, Phe, Gly, His, Ile, Lys, Leu, Met, Asn, Pro, Gln, Arg, Ser, Thr, Val, Trp or Tyr
  MOD_RES (25)...(25): Xaa = Ala, Asp, Glu, Phe, His, Lys, Leu, Met, Asn, Pro, Gln, Arg, Ser, Thr, Val, Trp or Tyr
  MOD_RES (26)...(26): Xaa = Ala, Asp, Glu, Phe, Gly, His, Lys, Leu, Asn, Pro, Gln, Arg, Ser, Thr, Val or Tyr
  MOD_RES (27)...(27): Xaa = Ala, Glu, Gly, His, Lys, Leu, Asn, Pro, Arg, Ser, Thr or Tyr
  MOD_RES (28)...(28): Xaa = Phe, His, Ile, Leu, Met, Arg, Thr, Trp or Tyr
  MOD_RES (29)...(29): Xaa = Ala, Asp, Glu, Phe, Gly, His, Ile, Lys, Leu, Met, Asn, Gln, Arg, Ser, Thr, Val or Tyr
  MOD_RES (30)...(30): Xaa = Asp, Gly or Ser
  MOD_RES (31)...(31): Xaa = Ala, Asp, Glu, Phe, His, Ile, Lys, Leu, Asn, Pro, Gln, Arg, Ser, Thr, Val or Tyr
  MOD_RES (32)...(32): Xaa = Ala, Asp, Glu, Phe, His, Ile, Lys, Leu, Met, Asn, Gln, Arg, Ser, Thr or Tyr
CXXXXXCXXXXCXXXXXXXXXCXCXXXXXXXXC

SEQ ID NO: 305 - protein, 34 aa, Artificial Sequence
  EGF domain monomer sequence
  MOD_RES (2)...(2): Xaa = Ala, Asp, Glu, Gly, Ile, Lys, Leu, Gln, Arg, Ser, Thr or Val
  MOD_RES (3)...(3): Xaa = Ala, Asp, Glu, Phe, Gly, His, Ile, Lys, Leu, Met, Asn, Pro, Gln, Arg, Ser, Thr or Val
  MOD_RES (4)...(4): Xaa = Ala, Glu, Phe, Gly, His, Leu, Asn, Pro, Gln, Arg, Ser, Thr, Trp or Tyr
  MOD_RES (5)...(5): Xaa = Ala, Asp, Glu, Phe, Gly, His, Ile, Lys, Leu, Asn, Pro, Arg, Ser or Thr
  MOD_RES (6)...(6): Xaa = Ala, Phe, Gly, Ile, Lys, Leu, Met, Asn, Pro, Gln, Arg, Ser, Thr, Val or Tyr
  MOD_RES (8)...(8): Xaa = Ala, Asp, Glu, Phe, Gly, His, Ile, Lys, Leu, Met, Asn, Pro, Gln, Arg, Ser, Thr or Val
  MOD_RES (9)...(9): Xaa = Ala, Asp, Glu, Phe, Gly, His, Lys, Leu, Asn, Pro, Gln, Arg, Ser, Thr or Tyr
  MOD_RES (10)...(10): Xaa = Ala, Gly or Thr
  MOD_RES (11)...(11): Xaa = Ala, Asp, Glu, Phe, His, Ile, Lys, Leu, Met, Asn, Gln, Arg, Ser, Thr or Val
  MOD_RES (13)...(13): Xaa = Ala, Asp, Phe, His, Ile, Lys, Leu, Met, Asn, Gln, Arg, Ser, Thr, Val or Tyr
  MOD_RES (14)...(14): Xaa = Ala, Asp, Glu, Phe, His, Leu, Met, Asn, Pro, Gln, Arg, Ser, Val or Tyr
  MOD_RES (15)...(15): Xaa = Ala, Asp, Glu, Phe, Gly, His, Leu, Asn, Arg, Ser, Thr, Val or Tyr
  MOD_RES (16)...(16): Xaa = Ala, Asp, Glu, Gly, Asn, Pro, Gln, Arg, Ser or Thr
  MOD_RES (17)...(17): Xaa = Ala, Asp, Glu, Phe, Gly, Lys, Leu, Asn, Pro, Gln, Arg, Ser or Thr
  MOD_RES (18)...(18): Xaa = Ala, Asp, Glu, Gly, Met, Asn, Arg, Ser, Thr, Val or Tyr
  MOD_RES (19)...(19): Xaa = Ala, Asp, Glu, Gly, Lys, Leu, Met, Gln, Arg, Ser or Thr
  MOD_RES (20)...(20): Xaa = Phe, His, Ile, Pro, Arg, Val, Trp or Tyr
  MOD_RES (21)...(21): Xaa = Ala, Glu, His, Lys, Leu, Gln, Ser, Thr, Val or Tyr
  MOD_RES (23)...(23): Xaa = Ala, Asp, Glu, Phe, Gly, His, Ile, Lys, Leu, Met, Asn, Pro, Gln, Arg, Ser, Thr, Val, Trp or Tyr
  MOD_RES (25)...(25): Xaa = Ala, Asp, Glu, Phe, Gly, His, Ile, Lys, Leu, Asn, Pro, Gln, Arg, Ser, Thr, Val or Tyr
  MOD_RES (26)...(26): Xaa = Ala, Asp, Glu, Phe, His, Ile, Lys, Leu, Met, Asn, Pro, Gln, Arg, Ser, Thr or Val
  MOD_RES (27)...(27): Xaa = Asp, Glu, Gly, Asn, Pro or Ser
  MOD_RES (28)...(28): Xaa = Ala, Asp, Glu, Phe, His, Leu, Met, Gln, Arg, Ser, Thr, Trp or Tyr
  MOD_RES (29)...(29): Xaa = Ala, Asp, Glu, Phe, Gly, His, Ile, Lys, Leu, Met, Asn, Gln, Arg, Ser, Thr, Val or Tyr
  MOD_RES (30)...(30): Xaa = Ala, Phe, Gly, Ile, Lys, Leu, Met, Pro, Gln, Arg, Ser, Thr, Val, Trp or Tyr
  MOD_RES (31)...(31): Xaa = Ala, Asp, Glu, Phe, Gly, His, Lys, Leu, Met, Asn, Pro, Gln, Arg, Ser, Thr, Val or Trp
  MOD_RES (32)...(32): Xaa = Ala, Asp, Glu, Gly, Ile, Lys, Leu, Met, Asn, Pro, Gln, Arg, Ser, Thr, Val or Tyr
  MOD_RES (33)...(33): Xaa = Ala, Asp, Glu, Phe, Gly, His, Ile, Lys, Leu, Met, Asn, Gln, Ser, Thr or Val
CXXXXXCXXXXCXXXXXXXXXCXCXXXXXXXXXC

SEQ ID NO: 306 - protein, 35 aa, Artificial Sequence
  EGF domain monomer sequence
  MOD_RES (2)...(2): Xaa = Ala, Asp, Glu, Gly, Ile, Lys, Leu, Gln, Arg, Ser, Thr or Val
  MOD_RES (3)...(3): Xaa = Ala, Asp, Glu, Phe, Gly, His, Ile, Lys, Leu, Met, Asn, Pro, Gln, Arg, Ser, Thr or Val
  MOD_RES (4)...(4): Xaa = Ala, Glu, Phe, Gly, His, Leu, Asn, Pro, Gln, Arg, Ser, Thr, Trp or Tyr
  MOD_RES (5)...(5): Xaa = Ala, Asp, Glu, Phe, Gly, His, Ile, Lys, Leu, Asn, Pro, Arg, Ser or Thr
  MOD_RES (6)...(6): Xaa = Ala, Phe, Gly, Ile, Lys, Leu, Met, Asn, Pro, Gln, Arg, Ser, Thr, Val or Tyr
  MOD_RES (8)...(8): Xaa = Ala, Asp, Glu, Phe, Gly, His, Ile, Lys, Leu, Met, Asn, Pro, Gln, Arg, Ser, Thr or Val
  MOD_RES (9)...(9): Xaa = Ala, Asp, Glu, Phe, Gly, His, Lys, Leu, Asn, Pro, Gln, Arg, Ser, Thr or Tyr
  MOD_RES (10)...(10): Xaa = Ala, Gly or Thr
  MOD_RES (11)...(11): Xaa = Ala, Asp, Glu, Phe, His, Ile, Lys, Leu, Met, Asn, Gln, Arg, Ser, Thr or Val
  MOD_RES (13)...(13): Xaa = Ala, Asp, Phe, His, Ile, Lys, Leu, Met, Asn, Gln, Arg, Ser, Thr, Val or Tyr
  MOD_RES (14)...(14): Xaa = Ala, Asp, Glu, Phe, His, Leu, Met, Asn, Pro, Gln, Arg, Ser, Val or Tyr
  MOD_RES (15)...(15): Xaa = Ala, Asp, Glu, Phe, Gly, His, Leu, Asn, Arg, Ser, Thr, Val or Tyr
  MOD_RES (16)...(16): Xaa = Ala, Asp, Glu, Gly, Asn, Pro, Gln, Arg, Ser or Thr
  MOD_RES (17)...(17): Xaa = Ala, Asp, Glu, Phe, Gly, Lys, Leu, Asn, Pro, Gln, Arg, Ser or Thr
  MOD_RES (18)...(18): Xaa = Ala, Asp, Glu, Gly, Met, Asn, Arg, Ser, Thr, Val or Tyr
  MOD_RES (19)...(19): Xaa = Ala, Asp, Glu, Gly, Lys, Leu, Met, Gln, Arg, Ser or Thr
  MOD_RES (20)...(20): Xaa = Phe, His, Ile, Pro, Arg, Val, Trp or Tyr
  MOD_RES (21)...(21): Xaa = Ala, Glu, His, Lys, Leu, Gln, Ser, Thr, Val or Tyr
  MOD_RES (23)...(23): Xaa = Ala, Asp, Glu, Phe, Gly, His, Ile, Lys, Leu, Met, Asn, Pro, Gln, Arg, Ser, Thr, Val, Trp or Tyr
  MOD_RES (25)...(25): Xaa = Ala, Asp, Glu, Phe, Gly, His, Ile, Lys, Leu, Asn, Pro, Gln, Arg, Ser, Thr, Val or Tyr
  MOD_RES (26)...(26): Xaa = Ala, Asp, Glu, Phe, His, Ile, Lys, Leu, Met, Asn, Pro, Gln, Arg, Ser, Thr or Val
  MOD_RES (27)...(27): Xaa = Asp, Glu, Gly, Asn, Pro or Ser
  MOD_RES (28)...(28): Xaa = Ala, Asp, Glu, Phe, His, Leu, Met, Gln, Arg, Ser, Thr, Trp or Tyr
  MOD_RES (29)...(29): Xaa = Ala, Asp, Glu, Phe, Gly, His, Ile, Lys, Leu, Met, Asn, Gln, Arg, Ser, Thr, Val or Tyr
  MOD_RES (30)...(30): Xaa = Ala, Phe, Gly, Ile, Lys, Leu, Met, Pro, Gln, Arg, Ser, Thr, Val, Trp or Tyr
  MOD_RES (31)...(31): Xaa = Ala, Asp, Glu, Phe, Gly, His, Lys, Leu, Met, Asn, Pro, Gln, Arg, Ser, Thr, Val or Trp
  MOD_RES (32)...(32): Xaa = Ala, Asp, Glu, Gly, Ile, Lys, Leu, Met, Asn, Pro, Gln, Arg, Ser, Thr, Val or Tyr
  MOD_RES (33)...(33): Xaa = Ala, Asp, Glu, Phe, Gly, His, Ile, Lys, Leu, Met, Asn, Gln, Ser, Thr or Val
  MOD_RES (34)...(34): Xaa = Glu, Phe, Gly, His, Ile, Lys, Leu, Met, Asn, Pro, Gln, Arg, Ser, Thr or Trp
CXXXXXCXXXXCXXXXXXXXXCXCXXXXXXXXXXC

SEQ ID NO: 307 - protein, 36 aa, Artificial Sequence
  EGF domain monomer sequence
  MOD_RES (2)...(2): Xaa = Ala, Asp, Glu, Gly, Ile, Lys, Leu, Gln, Arg, Ser, Thr or Val
  MOD_RES (3)...(3): Xaa = Ala, Asp, Glu, Phe, Gly, His, Ile, Lys, Leu, Met, Asn, Pro, Gln, Arg, Ser, Thr or Val
  MOD_RES (4)...(4): Xaa = Ala, Glu, Phe, Gly, His, Leu, Asn, Pro, Gln, Arg, Ser, Thr, Trp or Tyr
  MOD_RES (5)...(5): Xaa = Ala, Asp, Glu, Phe, Gly, His, Ile, Lys, Leu, Asn, Pro, Arg, Ser or Thr
  MOD_RES (6)...(6): Xaa = Ala, Phe, Gly, Ile, Lys, Leu, Met, Asn, Pro, Gln, Arg, Ser, Thr, Val or Tyr
  MOD_RES (8)...(8): Xaa = Ala, Asp, Glu, Phe, Gly, His, Ile, Lys, Leu, Met, Asn, Pro, Gln, Arg, Ser, Thr or Val
  MOD_RES (9)...(9): Xaa = Ala, Asp, Glu, Phe, Gly, His, Lys, Leu, Asn, Pro, Gln, Arg, Ser, Thr or Tyr
  MOD_RES (10)...(10): Xaa = Ala, Gly or Thr
  MOD_RES (11)...(11): Xaa = Ala, Asp, Glu, Phe, His, Ile, Lys, Leu, Met, Asn, Gln, Arg, Ser, Thr or Val
  MOD_RES (13)...(13): Xaa = Ala, Asp, Phe, His, Ile, Lys, Leu, Met, Asn, Gln, Arg, Ser, Thr, Val or Tyr
  MOD_RES (14)...(14): Xaa = Ala, Asp, Glu, Phe, His, Leu, Met, Asn, Pro, Gln, Arg, Ser, Val or Tyr
  MOD_RES (15)...(15): Xaa = Ala, Asp, Glu, Phe, Gly, His, Leu, Asn, Arg, Ser, Thr, Val or Tyr
  MOD_RES (16)...(16): Xaa = Ala, Asp, Glu, Gly, Asn, Pro, Gln, Arg, Ser or Thr
  MOD_RES (17)...(17): Xaa = Ala, Asp, Glu, Phe, Gly, Lys, Leu, Asn, Pro, Gln, Arg, Ser or Thr
  MOD_RES (18)...(18): Xaa = Ala, Asp, Glu, Gly, Met, Asn, Arg, Ser, Thr, Val or Tyr
  MOD_RES (19)...(19): Xaa = Ala, Asp, Glu, Gly, Lys, Leu, Met, Gln, Arg, Ser or Thr
  MOD_RES (20)...(20): Xaa = Phe, His, Ile, Pro, Arg, Val, Trp or Tyr
  MOD_RES (21)...(21): Xaa = Ala, Glu, His, Lys, Leu, Gln, Ser, Thr, Val or Tyr
  MOD_RES (23)...(23): Xaa = Ala, Asp, Glu, Phe, Gly, His, Ile, Lys, Leu, Met, Asn, Pro, Gln, Arg, Ser, Thr, Val, Trp or Tyr
  MOD_RES (25)...(25): Xaa = Ala, Asp, Glu, Phe, Gly, His, Ile, Lys, Leu, Asn, Pro, Gln, Arg, Ser, Thr, Val or Tyr
  MOD_RES (26)...(26): Xaa = Ala, Asp, Glu, Phe, His, Ile, Lys, Leu, Met, Asn, Pro, Gln, Arg, Ser, Thr or Val
  MOD_RES (27)...(27): Xaa = Asp, Glu, Gly, Asn, Pro or Ser
  MOD_RES (28)...(28): Xaa = Ala, Asp, Glu, Phe, His, Leu, Met, Gln, Arg, Ser, Thr, Trp or Tyr
  MOD_RES (29)...(29): Xaa = Ala, Asp, Glu, Phe, Gly, His, Ile, Lys, Leu, Met, Asn, Gln, Arg, Ser, Thr, Val or Tyr
  MOD_RES (30)...(30): Xaa = Ala, Phe, Gly, Ile, Lys, Leu, Met, Pro, Gln, Arg, Ser, Thr, Val, Trp or Tyr
  MOD_RES (31)...(31): Xaa = Ala, Asp, Glu, Phe, Gly, His, Lys, Leu, Met, Asn, Pro, Gln, Arg, Ser, Thr, Val or Trp
  MOD_RES (32)...(32): Xaa = Ala, Asp, Glu, Gly, Ile, Lys, Leu, Met, Asn, Pro, Gln, Arg, Ser, Thr, Val or Tyr
  MOD_RES (33)...(33): Xaa = Ala, Asp, Glu, Phe, Gly, His, Ile, Lys, Leu, Met, Asn, Gln, Ser, Thr or Val
  MOD_RES (34)...(34): Xaa = Glu, Phe, Gly, His, Ile, Lys, Leu, Met, Asn, Pro, Gln, Arg, Ser, Thr or Trp
  MOD_RES (35)...(35): Xaa = Ala, Asp, Glu, Phe, Gly, His, Lys, Leu, Met, Asn, Pro, Gln, Arg, Ser, Thr, Val or Tyr
CXXXXXCXXXXCXXXXXXXXXCXCXXXXXXXXXXXC

SEQ ID NO: 308 - protein, 37 aa, Artificial Sequence
  EGF domain monomer sequence
  MOD_RES (2)...(2): Xaa = Ala, Asp, Glu, Gly, Ile, Lys, Leu, Gln, Arg, Ser, Thr or Val
  MOD_RES (3)...(3): Xaa = Ala, Asp, Glu, Phe, Gly, His, Ile, Lys, Leu, Met, Asn, Pro, Gln, Arg, Ser, Thr or Val
  MOD_RES (4)...(4): Xaa = Ala, Glu, Phe, Gly, His, Leu, Asn, Pro, Gln, Arg, Ser, Thr, Trp or Tyr
  MOD_RES (5)...(5): Xaa = Ala, Asp, Glu, Phe, Gly, His, Ile, Lys, Leu, Asn, Pro, Arg, Ser or Thr
  MOD_RES (6)...(6): Xaa = Ala, Phe, Gly, Ile, Lys, Leu, Met, Asn, Pro, Gln, Arg, Ser, Thr, Val or Tyr
  MOD_RES (8)...(8): Xaa = Ala, Asp, Glu, Phe, Gly, His, Ile, Lys, Leu, Met, Asn, Pro, Gln, Arg, Ser, Thr or Val
  MOD_RES (9)...(9): Xaa = Ala, Asp, Glu, Phe, Gly, His, Lys, Leu, Asn, Pro, Gln, Arg, Ser, Thr or Tyr
  MOD_RES (10)...(10): Xaa = Ala, Gly or Thr
  MOD_RES (11)...(11): Xaa = Ala, Asp, Glu, Phe, His, Ile, Lys, Leu, Met, Asn, Gln, Arg, Ser, Thr or Val
  MOD_RES (13)...(13): Xaa = Ala, Asp, Phe, His, Ile, Lys, Leu, Met, Asn, Gln, Arg, Ser, Thr, Val or Tyr
  MOD_RES (14)...(14): Xaa = Ala, Asp, Glu, Phe, His, Leu, Met, Asn, Pro, Gln, Arg, Ser, Val or Tyr
  MOD_RES (15)...(15): Xaa = Ala, Asp, Glu, Phe, Gly, His, Leu, Asn, Arg, Ser, Thr, Val or Tyr
  MOD_RES (16)...(16): Xaa = Ala, Asp, Glu, Gly, Asn, Pro, Gln, Arg, Ser or Thr
  MOD_RES (17)...(17): Xaa = Ala, Asp, Glu, Phe, Gly, Lys, Leu, Asn, Pro, Gln, Arg, Ser or Thr
  MOD_RES (18)...(18): Xaa = Ala, Asp, Glu, Gly, Met, Asn, Arg, Ser, Thr, Val or Tyr
  MOD_RES (19)...(19): Xaa = Ala, Asp, Glu, Gly, Lys, Leu, Met, Gln, Arg, Ser or Thr
  MOD_RES (20)...(20): Xaa = Phe, His, Ile, Pro, Arg, Val, Trp or Tyr
  MOD_RES (21)...(21): Xaa = Ala, Glu, His, Lys, Leu, Gln, Ser, Thr, Val or Tyr
  MOD_RES (23)...(23): Xaa = Ala, Asp, Glu, Phe, Gly, His, Ile, Lys, Leu, Met, Asn, Pro, Gln, Arg, Ser, Thr, Val, Trp or Tyr
  MOD_RES (25)...(25): Xaa = Ala, Asp, Glu, Phe, Gly, His, Ile, Lys, Leu, Asn, Pro, Gln, Arg, Ser, Thr, Val or Tyr
  MOD_RES (26)...(26): Xaa = Ala, Asp, Glu, Phe, His, Ile, Lys, Leu, Met, Asn, Pro, Gln, Arg, Ser, Thr or Val
  MOD_RES (27)...(27): Xaa = Asp, Glu, Gly, Asn, Pro or Ser
  MOD_RES (28)...(28): Xaa = Ala, Asp, Glu, Phe, His, Leu, Met, Gln, Arg, Ser, Thr, Trp or Tyr
  MOD_RES (29)...(29): Xaa = Ala, Asp, Glu, Phe, Gly, His, Ile, Lys, Leu, Met, Asn, Gln, Arg, Ser, Thr, Val or Tyr
  MOD_RES (30)...(30): Xaa = Ala, Phe, Gly, Ile, Lys, Leu, Met, Pro, Gln, Arg, Ser, Thr, Val, Trp or Tyr
  MOD_RES (31)...(31): Xaa = Ala, Asp, Glu, Phe, Gly, His, Lys, Leu, Met, Asn, Pro, Gln, Arg, Ser, Thr, Val or Trp
  MOD_RES (32)...(32): Xaa = Ala, Asp, Glu, Gly, Ile, Lys, Leu, Met, Asn, Pro, Gln, Arg, Ser, Thr, Val or Tyr
  MOD_RES (33)...(33): Xaa = Ala, Asp, Glu, Phe, Gly, His, Ile, Lys, Leu, Met, Asn, Gln, Ser, Thr or Val
  MOD_RES (34)...(34): Xaa = Glu, Phe, Gly, His, Ile, Lys, Leu, Met, Asn, Pro, Gln, Arg, Ser, Thr or Trp
  MOD_RES (35)...(35): Xaa = Ala, Asp, Glu, Phe, Gly, His, Lys, Leu, Met, Asn, Pro, Gln, Arg, Ser, Thr, Val or Tyr
  MOD_RES (36)...(36): Xaa = Ala, Asp, Glu, Phe, Gly, His, Ile, Lys, Met, Asn, Gln, Arg, Ser, Thr, Val or Tyr
CXXXXXCXXXXCXXXXXXXXXCXCXXXXXXXXXXXXC

SEQ ID NO: 309 - protein, 34 aa, Artificial Sequence
  EGF domain monomer sequence
  MOD_RES (2)...(2): Xaa = Ala, Asp, Glu, Phe, Gly, Ile, Lys, Leu, Met, Asn, Pro, Gln, Arg, Ser, Thr, Val or Tyr
  MOD_RES (3)...(3): Xaa = Ala, Asp, Glu, Phe, Gly, His, Ile, Lys, Leu, Met, Asn, Pro, Gln, Arg, Ser, Thr, Val or Tyr
  MOD_RES (4)...(4): Xaa = Ala, Asp, Glu, Phe, Gly, His, Ile, Lys, Leu, Met, Asn, Pro, Gln, Arg, Ser, Thr, Val or Trp
  MOD_RES (5)...(5): Xaa = Ala, Asp, Glu, Phe, Gly, His, Ile, Lys, Leu, Met, Asn, Pro, Gln, Arg, Ser, Thr or Val
  MOD_RES (6)...(6): Xaa = Ala, Asp, Glu, Phe, Gly, His, Ile, Lys, Leu, Asn, Pro, Gln, Arg, Ser, Val or Tyr
  MOD_RES (7)...(7): Xaa = Ala, Asp, Glu, Gly, Ile, Lys, Leu, Met, Asn, Pro, Gln, Arg, Ser, Thr, Val or Tyr
  MOD_RES (9)...(9): Xaa = Ala, Asp, Glu, Phe, Gly, His, Ile, Lys, Leu, Met, Asn, Pro, Gln, Arg, Ser, Thr or Val
  MOD_RES (10)...(10): Xaa = Ala, Asp, Glu, Phe, Gly, His, Lys, Leu, Asn, Pro, Gln, Arg, Ser, Thr or Tyr
  MOD_RES (11)...(11): Xaa = Ala, Gly or Thr
  MOD_RES (12)...(12): Xaa = Ala, Asp, Glu, Phe, His, Ile, Lys, Leu, Met, Asn, Gln, Arg, Ser, Thr or Val
  MOD_RES (14)...(14): Xaa = Ala, Asp, Phe, His, Ile, Lys, Leu, Met, Asn, Gln, Arg, Ser, Thr, Val or Tyr
  MOD_RES (15)...(15): Xaa = Ala, Asp, Glu, Phe, His, Leu, Met, Asn, Pro, Gln, Arg, Ser, Val or Tyr
  MOD_RES (16)...(16): Xaa = Ala, Asp, Glu, Phe, Gly, His, Leu, Asn, Arg, Ser, Thr, Val or Tyr
  MOD_RES (17)...(17): Xaa = Ala, Asp, Glu, Gly, Asn, Pro, Gln, Arg, Ser or Thr
  MOD_RES (18)...(18): Xaa = Ala, Asp, Glu, Phe, Gly, Lys, Leu, Asn, Pro, Gln, Arg, Ser or Thr
  MOD_RES (19)...(19): Xaa = Ala, Asp, Glu, Gly, Met, Asn, Arg, Ser, Thr, Val or Tyr
  MOD_RES (20)...(20): Xaa = Ala, Asp, Glu, Gly, Lys, Leu, Met, Gln, Arg, Ser or Thr
  MOD_RES (21)...(21): Xaa = Phe, His, Ile, Pro, Arg, Val, Trp or Tyr
  MOD_RES (22)...(22): Xaa = Ala, Glu, His, Lys, Leu, Gln, Ser, Thr, Val or Tyr
  MOD_RES (24)...(24): Xaa = Ala, Asp, Glu, Phe, Gly, His, Ile, Lys, Leu, Met, Asn, Pro, Gln, Arg, Ser, Thr, Val, Trp or Tyr
  MOD_RES (26)...(26): Xaa = Ala, Asp, Glu, Phe, His, Lys, Leu, Met, Asn, Pro, Gln, Arg, Ser, Thr, Val, Trp or Tyr
  MOD_RES (27)...(27): Xaa = Ala, Asp, Glu, Phe, Gly, His, Lys, Leu, Asn, Pro, Gln, Arg, Ser, Thr, Val or Tyr
  MOD_RES (28)...(28): Xaa = Ala, Glu, Gly, His, Lys, Leu, Asn, Pro, Arg, Ser, Thr or Tyr
  MOD_RES (29)...(29): Xaa = Phe, His, Ile, Leu, Met, Arg, Thr, Trp or Tyr
  MOD_RES (30)...(30): Xaa = Ala, Asp, Glu, Phe, Gly, His, Ile, Lys, Leu, Met, Asn, Gln, Arg, Ser, Thr, Val or Tyr
  MOD_RES (31)...(31): Xaa = Asp, Gly or Ser
  MOD_RES (32)...(32): Xaa = Ala, Asp, Glu, Phe, His, Ile, Lys, Leu, Asn, Pro, Gln, Arg, Ser, Thr, Val or Tyr
  MOD_RES (33)...(33): Xaa = Ala, Asp, Glu, Phe, His, Ile, Lys, Leu, Met, Asn, Gln, Arg, Ser, Thr or Tyr
CXXXXXXCXXXXCXXXXXXXXXCXCXXXXXXXXC

SEQ ID NO: 310 - protein, 35 aa, Artificial Sequence
  EGF domain monomer sequence
  MOD_RES (2)...(2): Xaa = Ala, Asp, Glu, Phe, Gly, Ile, Lys, Leu, Met, Asn, Pro, Gln, Arg, Ser, Thr, Val or Tyr
  MOD_RES (3)...(3): Xaa = Ala, Asp, Glu, Phe, Gly, His, Ile, Lys, Leu, Met, Asn, Pro, Gln, Arg, Ser, Thr, Val or Tyr
  MOD_RES (4)...(4): Xaa = Ala, Asp, Glu, Phe, Gly, His, Ile, Lys, Leu, Met, Asn, Pro, Gln, Arg, Ser, Thr, Val or Trp
  MOD_RES (5)...(5): Xaa = Ala, Asp, Glu, Phe, Gly, His, Ile, Lys, Leu, Met, Asn, Pro, Gln, Arg, Ser, Thr or Val
  MOD_RES (6)...(6): Xaa = Ala, Asp, Glu, Phe, Gly, His, Ile, Lys, Leu, Asn, Pro, Gln, Arg, Ser, Val or Tyr
  MOD_RES (7)...(7): Xaa = Ala, Asp, Glu, Gly, Ile, Lys, Leu, Met, Asn, Pro, Gln, Arg, Ser, Thr, Val or Tyr
  MOD_RES (9)...(9): Xaa = Ala, Asp, Glu, Phe, Gly, His, Ile, Lys, Leu, Met, Asn, Pro, Gln, Arg, Ser, Thr or Val
  MOD_RES (10)...(10): Xaa = Ala, Asp, Glu, Phe, Gly, His, Lys, Leu, Asn, Pro, Gln, Arg, Ser, Thr or Tyr
  MOD_RES (11)...(11): Xaa = Ala, Gly or Thr
  MOD_RES (12)...(12): Xaa = Ala, Asp, Glu, Phe, His, Ile, Lys, Leu, Met, Asn, Gln, Arg, Ser, Thr or Val
  MOD_RES (14)...(14): Xaa = Ala, Asp, Phe, His, Ile, Lys, Leu, Met, Asn, Gln, Arg, Ser, Thr, Val or Tyr
  MOD_RES (15)...(15): Xaa = Ala, Asp, Glu, Phe, His, Leu, Met, Asn, Pro, Gln, Arg, Ser, Val or Tyr
  MOD_RES (16)...(16): Xaa = Ala, Asp, Glu, Phe, Gly, His, Leu, Asn, Arg, Ser, Thr, Val or Tyr
  MOD_RES (17)...(17): Xaa = Ala, Asp, Glu, Gly, Asn, Pro, Gln, Arg, Ser or Thr
  MOD_RES (18)...(18): Xaa = Ala, Asp, Glu, Phe, Gly, Lys, Leu, Asn, Pro, Gln, Arg, Ser or Thr
  MOD_RES (19)...(19): Xaa = Ala, Asp, Glu, Gly, Met, Asn, Arg, Ser, Thr, Val or Tyr
  MOD_RES (20)...(20): Xaa = Ala, Asp, Glu, Gly, Lys, Leu, Met, Gln, Arg, Ser or Thr
  MOD_RES (21)...(21): Xaa = Phe, His, Ile, Pro, Arg, Val, Trp or Tyr
  MOD_RES (22)...(22): Xaa = Ala, Glu, His, Lys, Leu, Gln, Ser, Thr, Val or Tyr
  MOD_RES (24)...(24): Xaa = Ala, Asp, Glu, Phe, Gly, His, Ile, Lys, Leu, Met, Asn, Pro, Gln, Arg, Ser, Thr, Val, Trp or Tyr
  MOD_RES (26)...(26): Xaa = Ala, Asp, Glu, Phe, Gly, His, Ile, Lys, Leu, Asn, Pro, Gln, Arg, Ser, Thr, Val or Tyr
  MOD_RES (27)...(27): Xaa = Ala, Asp, Glu, Phe, His, Ile, Lys, Leu, Met, Asn, Pro, Gln, Arg, Ser, Thr or Val
  MOD_RES (28)...(28): Xaa = Asp, Glu, Gly, Asn, Pro or Ser
  MOD_RES (29)...(29): Xaa = Ala, Asp, Glu, Phe, His, Leu, Met, Gln, Arg, Ser, Thr, Trp or Tyr
  MOD_RES (30)...(30): Xaa = Ala, Asp, Glu, Phe, Gly, His, Ile, Lys, Leu, Met, Asn, Gln, Arg, Ser, Thr, Val or Tyr
  MOD_RES (31)...(31): Xaa = Ala, Phe, Gly, Ile, Lys, Leu, Met, Pro, Gln, Arg, Ser, Thr, Val, Trp or Tyr
  MOD_RES (32)...(32): Xaa = Ala, Asp, Glu, Phe, Gly, His, Lys, Leu, Met, Asn, Pro, Gln, Arg, Ser, Thr, Val or Trp
  MOD_RES (33)...(33): Xaa = Ala, Asp, Glu, Gly, Ile, Lys, Leu, Met, Asn, Pro, Gln, Arg, Ser, Thr, Val or Tyr
  MOD_RES (34)...(34): Xaa = Ala, Asp, Glu, Phe, Gly, His, Ile, Lys, Leu, Met, Asn, Gln, Ser, Thr or Val
CXXXXXXCXXXXCXXXXXXXXXCXCXXXXXXXXXC

SEQ ID NO: 311 - protein, 36 aa, Artificial Sequence
  EGF domain monomer sequence
  MOD_RES (2)...(2): Xaa = Ala, Asp, Glu, Phe, Gly, Ile, Lys, Leu, Met, Asn, Pro, Gln, Arg, Ser, Thr, Val or Tyr
  MOD_RES (3)...(3): Xaa = Ala, Asp, Glu, Phe, Gly, His, Ile, Lys, Leu, Met, Asn, Pro, Gln, Arg, Ser, Thr, Val or Tyr
  MOD_RES (4)...(4): Xaa = Ala, Asp, Glu, Phe, Gly, His, Ile, Lys, Leu, Met, Asn, Pro, Gln, Arg, Ser, Thr, Val or Trp
  MOD_RES (5)...(5): Xaa = Ala, Asp, Glu, Phe, Gly, His, Ile, Lys, Leu, Met, Asn, Pro, Gln, Arg, Ser, Thr or Val
  MOD_RES (6)...(6): Xaa = Ala, Asp, Glu, Phe, Gly, His, Ile, Lys, Leu, Asn, Pro, Gln, Arg, Ser, Val or Tyr
  MOD_RES (7)...(7): Xaa = Ala, Asp, Glu, Gly, Ile, Lys, Leu, Met, Asn, Pro, Gln, Arg, Ser, Thr, Val or Tyr
  MOD_RES (9)...(9): Xaa = Ala, Asp, Glu, Phe, Gly, His, Ile, Lys, Leu, Met, Asn, Pro, Gln, Arg, Ser, Thr or Val
  MOD_RES (10)...(10): Xaa = Ala, Asp, Glu, Phe, Gly, His, Lys, Leu, Asn, Pro, Gln, Arg, Ser, Thr or Tyr
  MOD_RES (11)...(11): Xaa = Ala, Gly or Thr
  MOD_RES (12)...(12): Xaa = Ala, Asp, Glu, Phe, His, Ile, Lys, Leu, Met, Asn, Gln, Arg, Ser, Thr or Val
  MOD_RES (14)...(14): Xaa = Ala, Asp, Phe, His, Ile, Lys, Leu, Met, Asn, Gln, Arg, Ser, Thr, Val or Tyr
  MOD_RES (15)...(15): Xaa = Ala, Asp, Glu, Phe, His, Leu, Met, Asn, Pro, Gln, Arg, Ser, Val or Tyr
  MOD_RES (16)...(16): Xaa = Ala, Asp, Glu, Phe, Gly, His, Leu, Asn, Arg, Ser, Thr, Val or Tyr
  MOD_RES (17)...(17): Xaa = Ala, Asp, Glu, Gly, Asn, Pro, Gln, Arg, Ser or Thr
  MOD_RES (18)...(18): Xaa = Ala, Asp, Glu, Phe, Gly, Lys, Leu, Asn, Pro, Gln, Arg, Ser or Thr
  MOD_RES (19)...(19): Xaa = Ala, Asp, Glu, Gly, Met, Asn, Arg, Ser, Thr, Val or Tyr
  MOD_RES (20)...(20): Xaa = Ala, Asp, Glu, Gly, Lys, Leu, Met, Gln, Arg, Ser or Thr
  MOD_RES (21)...(21): Xaa = Phe, His, Ile, Pro, Arg, Val, Trp or Tyr
  MOD_RES (22)...(22): Xaa = Ala, Glu, His, Lys, Leu, Gln, Ser, Thr, Val or Tyr
  MOD_RES (24)...(24): Xaa = Ala, Asp, Glu, Phe, Gly, His, Ile, Lys, Leu, Met, Asn, Pro, Gln, Arg, Ser, Thr, Val, Trp or Tyr
  MOD_RES (26)...(26): Xaa = Ala, Asp, Glu, Phe, Gly, His, Ile, Lys, Leu, Asn, Pro, Gln, Arg, Ser, Thr, Val or Tyr
  MOD_RES (27)...(27): Xaa = Ala, Asp, Glu, Phe, His, Ile, Lys, Leu, Met, Asn, Pro, Gln, Arg, Ser, Thr or Val
  MOD_RES (28)...(28): Xaa = Asp, Glu, Gly, Asn, Pro or Ser
  MOD_RES (29)...(29): Xaa = Ala, Asp, Glu, Phe, His, Leu, Met, Gln, Arg, Ser, Thr, Trp or Tyr
  MOD_RES (30)...(30): Xaa = Ala, Asp, Glu, Phe, Gly, His, Ile, Lys, Leu, Met, Asn, Gln, Arg, Ser, Thr, Val or Tyr
  MOD_RES (31)...(31): Xaa = Ala, Phe, Gly, Ile, Lys, Leu, Met, Pro, Gln, Arg, Ser, Thr, Val, Trp or Tyr
  MOD_RES (32)...(32): Xaa = Ala, Asp, Glu, Phe, Gly, His, Lys, Leu, Met, Asn, Pro, Gln, Arg, Ser, Thr, Val or Trp
  MOD_RES (33)...(33): Xaa = Ala, Asp, Glu, Gly, Ile, Lys, Leu, Met, Asn, Pro, Gln, Arg, Ser, Thr, Val or Tyr
  MOD_RES (34)...(34): Xaa = Ala, Asp, Glu, Phe, Gly, His, Ile, Lys, Leu, Met, Asn, Gln, Ser, Thr or Val
  MOD_RES (35)...(35): Xaa = Glu, Phe, Gly, His, Ile, Lys, Leu, Met, Asn, Pro, Gln, Arg, Ser, Thr or Trp
CXXXXXXCXXXXCXXXXXXXXXCXCXXXXXXXXXXC

SEQ ID NO: 312 - protein, 37 aa, Artificial Sequence
  EGF domain monomer sequence
  MOD_RES (2)...(2): Xaa = Ala, Asp, Glu, Phe, Gly, Ile, Lys, Leu, Met, Asn, Pro, Gln, Arg, Ser, Thr, Val or Tyr
  MOD_RES (3)...(3): Xaa = Ala, Asp, Glu, Phe, Gly, His, Ile, Lys, Leu, Met, Asn, Pro, Gln, Arg, Ser, Thr, Val or Tyr
  MOD_RES (4)...(4): Xaa = Ala, Asp, Glu, Phe, Gly, His, Ile, Lys, Leu, Met, Asn, Pro, Gln, Arg, Ser, Thr, Val or Trp
  MOD_RES (5)...(5): Xaa = Ala, Asp, Glu, Phe, Gly, His, Ile, Lys, Leu, Met, Asn, Pro, Gln, Arg, Ser, Thr or Val
  MOD_RES (6)...(6): Xaa = Ala, Asp, Glu, Phe, Gly, His, Ile, Lys, Leu, Asn, Pro, Gln, Arg, Ser, Val or Tyr
  MOD_RES (7)...(7): Xaa = Ala, Asp, Glu, Gly, Ile, Lys, Leu, Met, Asn, Pro, Gln, Arg, Ser, Thr, Val or Tyr
  MOD_RES (9)...(9): Xaa = Ala, Asp, Glu, Phe, Gly, His, Ile, Lys, Leu, Met, Asn, Pro, Gln, Arg, Ser, Thr or Val
  MOD_RES (10)...(10): Xaa = Ala, Asp, Glu, Phe, Gly, His, Lys, Leu, Asn, Pro, Gln, Arg, Ser, Thr or Tyr
  MOD_RES (11)...(11): Xaa = Ala, Gly or Thr
  MOD_RES (12)...(12): Xaa = Ala, Asp, Glu, Phe, His, Ile, Lys, Leu, Met, Asn, Gln, Arg, Ser, Thr or Val
  MOD_RES (14)...(14): Xaa = Ala, Asp, Phe, His, Ile, Lys, Leu, Met, Asn, Gln, Arg, Ser, Thr, Val or Tyr
  MOD_RES (15)...(15): Xaa = Ala, Asp, Glu, Phe, His, Leu, Met, Asn, Pro, Gln, Arg, Ser, Val or Tyr
  MOD_RES (16)...(16): Xaa = Ala, Asp, Glu, Phe, Gly, His, Leu, Asn, Arg, Ser, Thr, Val or Tyr
  MOD_RES (17)...(17): Xaa = Ala, Asp, Glu, Gly, Asn, Pro, Gln, Arg, Ser or Thr
  MOD_RES (18)...(18): Xaa = Ala, Asp, Glu, Phe, Gly, Lys, Leu, Asn, Pro, Gln, Arg, Ser or Thr
  MOD_RES (19)...(19): Xaa = Ala, Asp, Glu, Gly, Met, Asn, Arg, Ser, Thr, Val or Tyr
  MOD_RES (20)...(20): Xaa = Ala, Asp, Glu, Gly, Lys, Leu, Met, Gln, Arg, Ser or Thr
  MOD_RES (21)...(21): Xaa = Phe, His, Ile, Pro, Arg, Val, Trp or Tyr
  MOD_RES (22)...(22): Xaa = Ala, Glu, His, Lys, Leu, Gln, Ser, Thr, Val or Tyr
  MOD_RES (24)...(24): Xaa = Ala, Asp, Glu, Phe, Gly, His, Ile, Lys, Leu, Met, Asn, Pro, Gln, Arg, Ser, Thr, Val, Trp or Tyr
  MOD_RES (26)...(26): Xaa = Ala, Asp, Glu, Phe, Gly, His, Ile, Lys, Leu, Asn, Pro, Gln, Arg, Ser, Thr, Val or Tyr
  MOD_RES (27)...(27): Xaa = Ala, Asp, Glu, Phe, His, Ile, Lys, Leu, Met, Asn, Pro, Gln, Arg, Ser, Thr or Val
  MOD_RES (28)...(28): Xaa = Asp, Glu, Gly, Asn, Pro or Ser
  MOD_RES (29)...(29): Xaa = Ala, Asp, Glu, Phe, His, Leu, Met, Gln, Arg, Ser, Thr, Trp or Tyr
  MOD_RES (30)...(30): Xaa = Ala, Asp, Glu, Phe, Gly, His, Ile, Lys, Leu, Met, Asn, Gln, Arg, Ser, Thr, Val or Tyr
  MOD_RES (31)...(31): Xaa = Ala, Phe, Gly, Ile, Lys, Leu, Met, Pro, Gln, Arg, Ser, Thr, Val, Trp or Tyr
  MOD_RES (32)...(32): Xaa = Ala, Asp, Glu, Phe, Gly, His, Lys, Leu, Met, Asn, Pro, Gln, Arg, Ser, Thr, Val or Trp
  MOD_RES (33)...(33): Xaa = Ala, Asp, Glu, Gly, Ile, Lys, Leu, Met, Asn, Pro, Gln, Arg, Ser, Thr, Val or Tyr
  MOD_RES (34)...(34): Xaa = Ala, Asp, Glu, Phe, Gly, His, Ile, Lys, Leu, Met, Asn, Gln, Ser, Thr or Val
  MOD_RES (35)...(35): Xaa = Glu, Phe, Gly, His, Ile, Lys, Leu, Met, Asn, Pro, Gln, Arg, Ser, Thr or Trp
  MOD_RES (36)...(36): Xaa = Ala, Asp, Glu, Phe, Gly, His, Lys, Leu, Met, Asn, Pro, Gln, Arg, Ser, Thr, Val or Tyr
CXXXXXXCXXXXCXXXXXXXXXCXCXXXXXXXXXXXC

SEQ ID NO: 313 - protein, 38 aa, Artificial Sequence
  EGF domain monomer sequence
  MOD_RES (2)...(2): Xaa = Ala, Asp, Glu, Phe, Gly, Ile, Lys, Leu, Met, Asn, Pro, Gln, Arg, Ser, Thr, Val or Tyr
  MOD_RES (3)...(3): Xaa = Ala, Asp, Glu, Phe, Gly, His, Ile, Lys, Leu, Met, Asn, Pro, Gln, Arg, Ser, Thr, Val or Tyr
  MOD_RES (4)...(4): Xaa = Ala, Asp, Glu, Phe, Gly, His, Ile, Lys, Leu, Met, Asn, Pro, Gln, Arg, Ser, Thr, Val or Trp
  MOD_RES (5)...(5): Xaa = Ala, Asp, Glu, Phe, Gly, His, Ile, Lys, Leu, Met, Asn, Pro, Gln, Arg, Ser, Thr or Val
  MOD_RES (6)...(6): Xaa = Ala, Asp, Glu, Phe, Gly, His, Ile, Lys, Leu, Asn, Pro, Gln, Arg, Ser, Val or Tyr
  MOD_RES (7)...(7): Xaa = Ala, Asp, Glu, Gly, Ile, Lys, Leu, Met, Asn, Pro, Gln, Arg, Ser, Thr, Val or Tyr
  MOD_RES (9)...(9): Xaa = Ala, Asp, Glu, Phe, Gly, His, Ile, Lys, Leu, Met, Asn, Pro, Gln, Arg, Ser, Thr or Val
  MOD_RES (10)...(10): Xaa = Ala, Asp, Glu, Phe, Gly, His, Lys, Leu, Asn, Pro, Gln, Arg, Ser, Thr or Tyr
  MOD_RES (11)...(11): Xaa = Ala, Gly or Thr
  MOD_RES (12)...(12): Xaa = Ala, Asp, Glu, Phe, His, Ile, Lys, Leu, Met, Asn, Gln, Arg, Ser, Thr or Val
  MOD_RES (14)...(14): Xaa = Ala, Asp, Phe, His, Ile, Lys, Leu, Met, Asn, Gln, Arg, Ser, Thr, Val or Tyr
  MOD_RES (15)...(15): Xaa = Ala, Asp, Glu, Phe, His, Leu, Met, Asn, Pro, Gln, Arg, Ser, Val or Tyr
  MOD_RES (16)...(16): Xaa = Ala, Asp, Glu, Phe, Gly, His, Leu, Asn, Arg, Ser, Thr, Val or Tyr
  MOD_RES (17)...(17): Xaa = Ala, Asp, Glu, Gly, Asn, Pro, Gln, Arg, Ser or Thr
  MOD_RES (18)...(18): Xaa = Ala, Asp, Glu, Phe, Gly, Lys, Leu, Asn, Pro, Gln, Arg, Ser or Thr
  MOD_RES (19)...(19): Xaa = Ala, Asp, Glu, Gly, Met, Asn, Arg, Ser, Thr, Val or Tyr
  MOD_RES (20)...(20): Xaa = Ala, Asp, Glu, Gly, Lys, Leu, Met, Gln, Arg, Ser or Thr
  MOD_RES (21)...(21): Xaa = Phe, His, Ile, Pro, Arg, Val, Trp or Tyr
  MOD_RES (22)...(22): Xaa = Ala, Glu, His, Lys, Leu, Gln, Ser, Thr, Val or Tyr
  MOD_RES (24)...(24): Xaa = Ala, Asp, Glu, Phe, Gly, His, Ile, Lys, Leu, Met, Asn, Pro, Gln, Arg, Ser, Thr, Val, Trp or Tyr
  MOD_RES (26)...(26): Xaa = Ala, Asp, Glu, Phe, Gly, His, Ile, Lys, Leu, Asn, Pro, Gln, Arg, Ser, Thr, Val or Tyr
  MOD_RES (27)...(27): Xaa = Ala, Asp, Glu, Phe, His, Ile, Lys, Leu, Met, Asn, Pro, Gln, Arg, Ser, Thr or Val
  MOD_RES (28)...(28): Xaa = Asp, Glu, Gly, Asn, Pro or Ser
  MOD_RES (29)...(29): Xaa = Ala, Asp, Glu, Phe, His, Leu, Met, Gln, Arg, Ser, Thr, Trp or Tyr
  MOD_RES (30)...(30): Xaa = Ala, Asp, Glu, Phe, Gly, His, Ile, Lys, Leu, Met, Asn, Gln, Arg, Ser, Thr, Val or Tyr
  MOD_RES (31)...(31): Xaa = Ala, Phe, Gly, Ile, Lys, Leu, Met, Pro, Gln, Arg, Ser, Thr, Val, Trp or Tyr
  MOD_RES (32)...(32): Xaa = Ala, Asp, Glu, Phe, Gly, His, Lys, Leu, Met, Asn, Pro, Gln, Arg, Ser, Thr, Val or Trp
  MOD_RES (33)...(33): Xaa = Ala, Asp, Glu, Gly, Ile, Lys, Leu, Met, Asn, Pro, Gln, Arg, Ser, Thr, Val or Tyr
  MOD_RES (34)...(34): Xaa = Ala, Asp, Glu, Phe, Gly, His, Ile, Lys, Leu, Met, Asn, Gln, Ser, Thr or Val
  MOD_RES (35)...(35): Xaa = Glu, Phe, Gly, His, Ile, Lys, Leu, Met, Asn, Pro, Gln, Arg, Ser, Thr or Trp
  MOD_RES (36)...(36): Xaa = Ala, Asp, Glu, Phe, Gly, His, Lys, Leu, Met, Asn, Pro, Gln, Arg, Ser, Thr, Val or Tyr
  MOD_RES (37)...(37): Xaa = Ala, Asp, Glu, Phe, Gly, His, Ile, Lys, Met, Asn, Gln, Arg, Ser, Thr, Val or Tyr
CXXXXXXCXXXXCXXXXXXXXXCXCXXXXXXXXXXXXC

SEQ ID NO: 314 - protein, 34 aa, Artificial Sequence
  EGF domain monomer sequence
  MOD_RES (2)...(2): Xaa = Ala, Asp, Glu, Gly, Ile, Lys, Leu, Gln, Arg, Ser, Thr or Val
  MOD_RES (3)...(3): Xaa = Ala, Asp, Glu, Phe, Gly, His, Ile, Lys, Leu, Met, Asn, Pro, Gln, Arg, Ser, Thr or Val
  MOD_RES (4)...(4): Xaa = Ala, Glu, Phe, Gly, His, Leu, Asn, Pro, Gln, Arg, Ser, Thr, Trp or Tyr
  MOD_RES (5)...(5): Xaa = Ala, Asp, Glu, Phe, Gly, His, Ile, Lys, Leu, Asn, Pro, Arg, Ser or Thr
  MOD_RES (6)...(6): Xaa = Ala, Phe, Gly, Ile, Lys, Leu, Met, Asn, Pro, Gln, Arg, Ser, Thr, Val or Tyr
  MOD_RES (8)...(8): Xaa = Ala, Cys, Asp, Glu, Phe, Gly, His, Lys, Leu, Met, Asn, Pro, Gln, Arg, Ser, Val or Tyr
  MOD_RES (9)...(9): Xaa = Ala, Asp, Glu, Gly, His, Ile, Lys, Leu, Met, Asn, Pro, Gln, Arg, Ser, Thr, Val or Tyr
  MOD_RES (10)...(10): Xaa = Ala, Asp, Glu, Phe, Gly, His, Lys, Leu, Asn, Gln, Arg, Ser, Thr or Tyr
  MOD_RES (11)...(11): Xaa = Ala, Phe, Gly, His, Gln, Ser, Thr or Val
  MOD_RES (12)...(12): Xaa = Ala, Asp, Glu, Phe, His, Ile, Lys, Leu, Met, Asn, Gln, Arg, Ser, Thr or Val
  MOD_RES (14)...(14): Xaa = Ala, Asp, Phe, His, Ile, Lys, Leu, Met, Asn, Gln, Arg, Ser, Thr, Val or Tyr
  MOD_RES (15)...(15): Xaa = Ala, Asp, Glu, Phe, His, Leu, Met, Asn, Pro, Gln, Arg, Ser, Val or Tyr
  MOD_RES (16)...(16): Xaa = Ala, Asp, Glu, Phe, Gly, His, Leu, Asn, Arg, Ser, Thr, Val or Tyr
  MOD_RES (17)...(17): Xaa = Ala, Asp, Glu, Gly, Asn, Pro, Gln, Arg, Ser or Thr
  MOD_RES (18)...(18): Xaa = Ala, Asp, Glu, Phe, Gly, Lys, Leu, Asn, Pro, Gln, Arg, Ser or Thr
  MOD_RES (19)...(19): Xaa = Ala, Asp, Glu, Gly, Met, Asn, Arg, Ser, Thr, Val or Tyr
  MOD_RES (20)...(20): Xaa = Ala, Asp, Glu, Gly, Lys, Leu, Met, Gln, Arg, Ser or Thr
  MOD_RES (21)...(21): Xaa = Phe, His, Ile, Pro, Arg, Val, Trp or Tyr
  MOD_RES (22)...(22): Xaa = Ala, Glu, His, Lys, Leu, Gln, Ser, Thr, Val or Tyr
  MOD_RES (24)...(24): Xaa = Ala, Asp, Glu, Phe, Gly, His, Ile, Lys, Leu, Met, Asn, Pro, Gln, Arg, Ser, Thr, Val, Trp or Tyr
  MOD_RES (26)...(26): Xaa = Ala, Asp, Glu, Phe, His, Lys, Leu, Met, Asn, Pro, Gln, Arg, Ser, Thr, Val, Trp or Tyr
  MOD_RES (27)...(27): Xaa = Ala, Asp, Glu, Phe, Gly, His, Lys, Leu, Asn, Pro, Gln, Arg, Ser, Thr, Val or Tyr
  MOD_RES (28)...(28): Xaa = Ala, Glu, Gly, His, Lys, Leu, Asn, Pro, Arg, Ser, Thr or Tyr
  MOD_RES (29)...(29): Xaa = Phe, His, Ile, Leu, Met, Arg, Thr, Trp or Tyr
  MOD_RES (30)...(30): Xaa = Ala, Asp, Glu, Phe, Gly, His, Ile, Lys, Leu, Met, Asn, Gln, Arg, Ser, Thr, Val or Tyr
  MOD_RES (31)...(31): Xaa = Asp, Gly or Ser
  MOD_RES (32)...(32): Xaa = Ala, Asp, Glu, Phe, His, Ile, Lys, Leu, Asn, Pro, Gln, Arg, Ser, Thr, Val or Tyr
  MOD_RES (33)...(33): Xaa = Ala, Asp, Glu, Phe, His, Ile, Lys, Leu, Met, Asn, Gln, Arg, Ser, Thr or Tyr
CXXXXXCXXXXXCXXXXXXXXXCXCXXXXXXXXC

SEQ ID NO: 315 - protein, 35 aa, Artificial Sequence
  EGF domain monomer sequence
  MOD_RES (2)...(2): Xaa = Ala, Asp, Glu, Gly, Ile, Lys, Leu, Gln, Arg, Ser, Thr or Val
  MOD_RES (3)...(3): Xaa = Ala, Asp, Glu, Phe, Gly, His, Ile, Lys, Leu, Met, Asn, Pro, Gln, Arg, Ser, Thr or Val
  MOD_RES (4)...(4): Xaa = Ala, Glu, Phe, Gly, His, Leu, Asn, Pro, Gln, Arg, Ser, Thr, Trp or Tyr
  MOD_RES (5)...(5): Xaa = Ala, Asp, Glu, Phe, Gly, His, Ile, Lys, Leu, Asn, Pro, Arg, Ser or Thr
  MOD_RES (6)...(6): Xaa = Ala, Phe, Gly, Ile, Lys, Leu, Met, Asn, Pro, Gln, Arg, Ser, Thr, Val or Tyr
  MOD_RES (8)...(8): Xaa = Ala, Cys, Asp, Glu, Phe, Gly, His, Lys, Leu, Met, Asn, Pro, Gln, Arg, Ser, Val or Tyr
  MOD_RES (9)...(9): Xaa = Ala, Asp, Glu, Gly, His, Ile, Lys, Leu, Met, Asn, Pro, Gln, Arg, Ser, Thr, Val or Tyr
  MOD_RES (10)...(10): Xaa = Ala, Asp, Glu, Phe, Gly, His, Lys, Leu, Asn, Gln, Arg, Ser, Thr or Tyr
  MOD_RES (11)...(11): Xaa = Ala, Phe, Gly, His, Gln, Ser, Thr or Val
  MOD_RES (12)...(12): Xaa = Ala, Asp, Glu, Phe, His, Ile, Lys, Leu, Met, Asn, Gln, Arg, Ser, Thr or Val
  MOD_RES (14)...(14): Xaa = Ala, Asp, Phe, His, Ile, Lys, Leu, Met, Asn, Gln, Arg, Ser, Thr, Val or Tyr
  MOD_RES (15)...(15): Xaa = Ala, Asp, Glu, Phe, His, Leu, Met, Asn, Pro, Gln, Arg, Ser, Val or Tyr
  MOD_RES (16)...(16): Xaa = Ala, Asp, Glu, Phe, Gly, His, Leu, Asn, Arg, Ser, Thr, Val or Tyr
  MOD_RES (17)...(17): Xaa = Ala, Asp, Glu, Gly, Asn, Pro, Gln, Arg, Ser or Thr
  MOD_RES (18)...(18): Xaa = Ala, Asp, Glu, Phe, Gly, Lys, Leu, Asn, Pro, Gln, Arg, Ser or Thr
  MOD_RES (19)...(19): Xaa = Ala, Asp, Glu, Gly, Met, Asn, Arg, Ser, Thr, Val or Tyr
  MOD_RES (20)...(20): Xaa = Ala, Asp, Glu, Gly, Lys, Leu, Met, Gln, Arg, Ser or Thr
  MOD_RES (21)...(21): Xaa = Phe, His, Ile, Pro, Arg, Val, Trp or Tyr
  MOD_RES (22)...(22): Xaa = Ala, Glu, His, Lys, Leu, Gln, Ser, Thr, Val or Tyr
  MOD_RES (24)...(24): Xaa = Ala, Asp, Glu, Phe, Gly, His, Ile, Lys, Leu, Met, Asn, Pro, Gln, Arg, Ser, Thr, Val, Trp or Tyr
  MOD_RES (26)...(26): Xaa = Ala, Asp, Glu, Phe, Gly, His, Ile, Lys, Leu, Asn, Pro, Gln, Arg, Ser, Thr, Val or Tyr
  MOD_RES (27)...(27): Xaa = Ala, Asp, Glu, Phe, His, Ile, Lys, Leu, Met, Asn, Pro, Gln, Arg, Ser, Thr or Val
  MOD_RES (28)...(28): Xaa = Asp, Glu, Gly, Asn, Pro or Ser
  MOD_RES (29)...(29): Xaa = Ala, Asp, Glu, Phe, His, Leu, Met, Gln, Arg, Ser, Thr, Trp or Tyr
  MOD_RES (30)...(30): Xaa = Ala, Asp, Glu, Phe, Gly, His, Ile, Lys, Leu, Met, Asn, Gln, Arg, Ser, Thr, Val or Tyr
  MOD_RES (31)...(31): Xaa = Ala, Phe, Gly, Ile, Lys, Leu, Met, Pro, Gln, Arg, Ser, Thr, Val, Trp or Tyr
  MOD_RES (32)...(32): Xaa = Ala, Asp, Glu, Phe, Gly, His, Lys, Leu, Met, Asn, Pro, Gln, Arg, Ser, Thr, Val or Trp
  MOD_RES (33)...(33): Xaa = Ala, Asp, Glu, Gly, Ile, Lys, Leu, Met, Asn, Pro, Gln, Arg, Ser, Thr, Val or Tyr
  MOD_RES (34)...(34): Xaa = Ala, Asp, Glu, Phe, Gly, His, Ile, Lys, Leu, Met, Asn, Gln, Ser, Thr or Val
CXXXXXCXXXXXCXXXXXXXXXCXCXXXXXXXXXC

SEQ ID NO: 316 - protein, 36 aa, Artificial Sequence
  EGF domain monomer sequence
  MOD_RES (2)...(2): Xaa = Ala, Asp, Glu, Gly, Ile, Lys, Leu, Gln, Arg, Ser, Thr or Val
  MOD_RES (3)...(3): Xaa = Ala, Asp, Glu, Phe, Gly, His, Ile, Lys, Leu, Met, Asn, Pro, Gln, Arg, Ser, Thr or Val
  MOD_RES (4)...(4): Xaa = Ala, Glu, Phe, Gly, His, Leu, Asn, Pro, Gln, Arg, Ser, Thr, Trp or Tyr
  MOD_RES (5)...(5): Xaa = Ala, Asp, Glu, Phe, Gly, His, Ile, Lys, Leu, Asn, Pro, Arg, Ser or Thr
  MOD_RES (6)...(6): Xaa = Ala, Phe, Gly, Ile, Lys, Leu, Met, Asn, Pro, Gln, Arg, Ser, Thr, Val or Tyr
  MOD_RES (8)...(8): Xaa = Ala, Cys, Asp, Glu, Phe, Gly, His, Lys, Leu, Met, Asn, Pro, Gln, Arg, Ser, Val or Tyr
  MOD_RES (9)...(9): Xaa = Ala, Asp, Glu, Gly, His, Ile, Lys, Leu, Met, Asn, Pro, Gln, Arg, Ser, Thr, Val or Tyr
  MOD_RES (10)...(10): Xaa = Ala, Asp, Glu, Phe, Gly, His, Lys, Leu, Asn, Gln, Arg, Ser, Thr or Tyr
  MOD_RES (11)...(11): Xaa = Ala, Phe, Gly, His, Gln, Ser, Thr or Val
  MOD_RES (12)...(12): Xaa = Ala, Asp, Glu, Phe, His, Ile, Lys, Leu, Met, Asn, Gln, Arg, Ser, Thr or Val
  MOD_RES (14)...(14): Xaa = Ala, Asp, Phe, His, Ile, Lys, Leu, Met, Asn, Gln, Arg, Ser, Thr, Val or Tyr
  MOD_RES (15)...(15): Xaa = Ala, Asp, Glu, Phe, His, Leu, Met, Asn, Pro, Gln, Arg, Ser, Val or Tyr
  MOD_RES (16)...(16): Xaa = Ala, Asp, Glu, Phe, Gly, His, Leu, Asn, Arg, Ser, Thr, Val or Tyr
  MOD_RES (17)...(17): Xaa = Ala, Asp, Glu, Gly, Asn, Pro, Gln, Arg, Ser or Thr
  MOD_RES (18)...(18): Xaa = Ala, Asp, Glu, Phe, Gly, Lys, Leu, Asn, Pro, Gln, Arg, Ser or Thr
  MOD_RES (19)...(19): Xaa = Ala, Asp, Glu, Gly, Met, Asn, Arg, Ser, Thr, Val or Tyr
  MOD_RES (20)...(20): Xaa = Ala, Asp, Glu, Gly, Lys, Leu, Met, Gln, Arg, Ser or Thr
  MOD_RES (21)...(21): Xaa = Phe, His, Ile, Pro, Arg, Val, Trp or Tyr
  MOD_RES (22)...(22): Xaa = Ala, Glu, His, Lys, Leu, Gln, Ser, Thr, Val or Tyr
  MOD_RES (24)...(24): Xaa = Ala, Asp, Glu, Phe, Gly, His, Ile, Lys, Leu, Met, Asn, Pro, Gln, Arg, Ser, Thr, Val, Trp or Tyr
  MOD_RES (26)...(26): Xaa = Ala, Asp, Glu, Phe, Gly, His, Ile, Lys, Leu, Asn, Pro, Gln, Arg, Ser, Thr, Val or Tyr
  MOD_RES (27)...(27): Xaa = Ala, Asp, Glu, Phe, His, Ile, Lys, Leu, Met, Asn, Pro, Gln, Arg, Ser, Thr or Val
  MOD_RES (28)...(28): Xaa = Asp, Glu, Gly, Asn, Pro or Ser
  MOD_RES (29)...(29): Xaa = Ala, Asp, Glu, Phe, His, Leu, Met, Gln, Arg, Ser, Thr, Trp or Tyr
  MOD_RES (30)...(30): Xaa = Ala, Asp, Glu, Phe, Gly, His, Ile, Lys, Leu, Met, Asn, Gln, Arg, Ser, Thr, Val or Tyr
  MOD_RES (31)...(31): Xaa = Ala, Phe, Gly, Ile, Lys, Leu, Met, Pro, Gln, Arg, Ser, Thr, Val, Trp or Tyr
  MOD_RES (32)...(32): Xaa = Ala, Asp, Glu, Phe, Gly, His, Lys, Leu, Met, Asn, Pro, Gln, Arg, Ser, Thr, Val or Trp
  MOD_RES (33)...(33): Xaa = Ala, Asp, Glu, Gly, Ile, Lys, Leu, Met, Asn, Pro, Gln, Arg, Ser, Thr, Val or Tyr
  MOD_RES (34)...(34): Xaa = Ala, Asp, Glu, Phe, Gly, His, Ile, Lys, Leu, Met, Asn, Gln, Ser, Thr or Val
  MOD_RES (35)...(35): Xaa = Glu, Phe, Gly, His, Ile, Lys, Leu, Met, Asn, Pro, Gln, Arg, Ser, Thr or Trp
CXXXXXCXXXXXCXXXXXXXXXCXCXXXXXXXXXXC

SEQ ID NO: 317 - protein, 37 aa, Artificial Sequence
  EGF domain monomer sequence
  MOD_RES (2)...(2): Xaa = Ala, Asp, Glu, Gly, Ile, Lys, Leu, Gln, Arg, Ser, Thr or Val
  MOD_RES (3)...(3): Xaa = Ala, Asp, Glu, Phe, Gly, His, Ile, Lys, Leu, Met, Asn, Pro, Gln, Arg, Ser, Thr or Val
  MOD_RES (4)...(4): Xaa = Ala, Glu, Phe, Gly, His, Leu, Asn, Pro, Gln, Arg, Ser, Thr, Trp or Tyr
  MOD_RES (5)...(5): Xaa = Ala, Asp, Glu, Phe, Gly, His, Ile, Lys, Leu, Asn, Pro, Arg, Ser or Thr
  MOD_RES (6)...(6): Xaa = Ala, Phe, Gly, Ile, Lys, Leu, Met, Asn, Pro, Gln, Arg, Ser, Thr, Val or Tyr
  MOD_RES (8)...(8): Xaa = Ala, Cys, Asp, Glu, Phe, Gly, His, Lys, Leu, Met, Asn, Pro, Gln, Arg, Ser, Val or Tyr
  MOD_RES (9)...(9): Xaa = Ala, Asp, Glu, Gly, His, Ile, Lys, Leu, Met, Asn, Pro, Gln, Arg, Ser, Thr, Val or Tyr
  MOD_RES (10)...(10): Xaa = Ala, Asp, Glu, Phe, Gly, His, Lys, Leu, Asn, Gln, Arg, Ser, Thr or Tyr
  MOD_RES (11)...(11): Xaa = Ala, Phe, Gly, His, Gln, Ser, Thr or Val
  MOD_RES (12)...(12): Xaa = Ala, Asp, Glu, Phe, His, Ile, Lys, Leu, Met, Asn, Gln, Arg, Ser, Thr or Val
  MOD_RES (14)...(14): Xaa = Ala, Asp, Phe, His, Ile, Lys, Leu, Met, Asn, Gln, Arg, Ser, Thr, Val or Tyr
  MOD_RES (15)...(15): Xaa = Ala, Asp, Glu, Phe, His, Leu, Met, Asn, Pro, Gln, Arg, Ser, Val or Tyr
  MOD_RES (16)...(16): Xaa = Ala, Asp, Glu, Phe, Gly, His, Leu, Asn, Arg, Ser, Thr, Val or Tyr
  MOD_RES (17)...(17): Xaa = Ala, Asp, Glu, Gly, Asn, Pro, Gln, Arg, Ser or Thr
  MOD_RES (18)...(18): Xaa = Ala, Asp, Glu, Phe, Gly, Lys, Leu, Asn, Pro, Gln, Arg, Ser or Thr
  MOD_RES (19)...(19): Xaa = Ala, Asp, Glu, Gly, Met, Asn, Arg, Ser, Thr, Val or Tyr
  MOD_RES (20)...(20): Xaa = Ala, Asp, Glu, Gly, Lys, Leu, Met, Gln, Arg, Ser or Thr
  MOD_RES (21)...(21): Xaa = Phe, His, Ile, Pro, Arg, Val, Trp or Tyr
  MOD_RES (22)...(22): Xaa = Ala, Glu, His, Lys, Leu, Gln, Ser, Thr, Val or Tyr
  MOD_RES (24)...(24): Xaa = Ala, Asp, Glu, Phe, Gly, His, Ile, Lys, Leu, Met, Asn, Pro, Gln, Arg, Ser, Thr, Val, Trp or Tyr
  MOD_RES (26)...(26): Xaa = Ala, Asp, Glu, Phe, Gly, His, Ile, Lys, Leu, Asn, Pro, Gln, Arg, Ser, Thr, Val or Tyr
  MOD_RES (27)...(27): Xaa = Ala, Asp, Glu, Phe, His, Ile, Lys, Leu, Met, Asn, Pro, Gln, Arg, Ser, Thr or Val
  MOD_RES (28)...(28): Xaa = Asp, Glu, Gly, Asn, Pro or Ser
  MOD_RES (29)...(29): Xaa = Ala, Asp, Glu, Phe, His, Leu, Met, Gln, Arg, Ser, Thr, Trp or Tyr
  MOD_RES (30)...(30): Xaa = Ala, Asp, Glu, Phe, Gly, His, Ile, Lys, Leu, Met, Asn, Gln, Arg, Ser, Thr, Val or Tyr
  MOD_RES (31)...(31): Xaa = Ala, Phe, Gly, Ile, Lys, Leu, Met, Pro, Gln, Arg, Ser, Thr, Val, Trp or Tyr
  MOD_RES (32)...(32): Xaa = Ala, Asp, Glu, Phe, Gly, His, Lys, Leu, Met, Asn, Pro, Gln, Arg, Ser, Thr, Val or Trp
  MOD_RES (33)...(33): Xaa = Ala, Asp, Glu, Gly, Ile, Lys, Leu, Met, Asn, Pro, Gln, Arg, Ser, Thr, Val or Tyr
  MOD_RES (34)...(34): Xaa = Ala, Asp, Glu, Phe, Gly, His, Ile, Lys, Leu, Met, Asn, Gln, Ser, Thr or Val
  MOD_RES (35)...(35): Xaa = Glu, Phe, Gly, His, Ile, Lys, Leu, Met, Asn, Pro, Gln, Arg, Ser, Thr or Trp
  MOD_RES (36)...(36): Xaa = Ala, Asp, Glu, Phe, Gly, His, Lys, Leu, Met, Asn, Pro, Gln, Arg, Ser, Thr, Val or Tyr
CXXXXXCXXXXXCXXXXXXXXXCXCXXXXXXXXXXXC

SEQ ID NO: 318 - protein, 38 aa, Artificial Sequence
  EGF domain monomer sequence
  MOD_RES (2)...(2): Xaa = Ala, Asp, Glu, Gly, Ile, Lys, Leu, Gln, Arg, Ser, Thr or Val
  MOD_RES (3)...(3): Xaa = Ala, Asp, Glu, Phe, Gly, His, Ile, Lys, Leu, Met, Asn, Pro, Gln, Arg, Ser, Thr or Val
  MOD_RES (4)...(4): Xaa = Ala, Glu, Phe, Gly, His, Leu, Asn, Pro, Gln, Arg, Ser, Thr, Trp or Tyr
  MOD_RES (5)...(5): Xaa = Ala, Asp, Glu, Phe, Gly, His, Ile, Lys, Leu, Asn, Pro, Arg, Ser or Thr
  MOD_RES (6)...(6): Xaa = Ala, Phe, Gly, Ile, Lys, Leu, Met, Asn, Pro, Gln, Arg, Ser, Thr, Val or Tyr
  MOD_RES (8)...(8): Xaa = Ala, Cys, Asp, Glu, Phe, Gly, His, Lys, Leu, Met, Asn, Pro, Gln, Arg, Ser, Val or Tyr
  MOD_RES (9)...(9): Xaa = Ala, Asp, Glu, Gly, His, Ile, Lys, Leu, Met, Asn, Pro, Gln, Arg, Ser, Thr, Val or Tyr
  MOD_RES (10)...(10): Xaa = Ala, Asp, Glu, Phe, Gly, His, Lys, Leu, Asn, Gln, Arg, Ser, Thr or Tyr
  MOD_RES (11)...(11): Xaa = Ala, Phe, Gly, His, Gln, Ser, Thr or Val
  MOD_RES (12)...(12): Xaa = Ala, Asp, Glu, Phe, His, Ile, Lys, Leu, Met, Asn, Gln, Arg, Ser, Thr or Val
  MOD_RES (14)...(14): Xaa = Ala, Asp, Phe, His, Ile, Lys, Leu, Met, Asn, Gln, Arg, Ser, Thr, Val or Tyr
  MOD_RES (15)...(15): Xaa = Ala, Asp, Glu, Phe, His, Leu, Met, Asn, Pro, Gln, Arg, Ser, Val or Tyr
  MOD_RES (16)...(16): Xaa = Ala, Asp, Glu, Phe, Gly, His, Leu, Asn, Arg, Ser, Thr, Val or Tyr
  MOD_RES (17)...(17): Xaa = Ala, Asp, Glu, Gly, Asn, Pro, Gln, Arg, Ser or Thr
  MOD_RES (18)...(18): Xaa = Ala, Asp, Glu, Phe, Gly, Lys, Leu, Asn, Pro, Gln, Arg, Ser or Thr
  MOD_RES (19)...(19): Xaa = Ala, Asp, Glu, Gly, Met, Asn, Arg, Ser, Thr, Val or Tyr
  MOD_RES (20)...(20): Xaa = Ala, Asp, Glu, Gly, Lys, Leu, Met, Gln, Arg, Ser or Thr
  MOD_RES (21)...(21): Xaa = Phe, His, Ile, Pro, Arg, Val, Trp or Tyr
  MOD_RES (22)...(22): Xaa = Ala, Glu, His, Lys, Leu, Gln, Ser, Thr, Val or Tyr
  MOD_RES (24)...(24): Xaa = Ala, Asp, Glu, Phe, Gly, His, Ile, Lys, Leu, Met, Asn, Pro, Gln, Arg, Ser, Thr, Val, Trp or Tyr
  MOD_RES (26)...(26): Xaa = Ala, Asp, Glu, Phe, Gly, His, Ile, Lys, Leu, Asn, Pro, Gln, Arg, Ser, Thr, Val or Tyr
  MOD_RES (27)...(27): Xaa = Ala, Asp, Glu, Phe, His, Ile, Lys, Leu, Met, Asn, Pro, Gln, Arg, Ser, Thr or Val
  MOD_RES (28)...(28): Xaa = Asp, Glu, Gly, Asn, Pro or Ser
  MOD_RES (29)...(29): Xaa = Ala, Asp, Glu, Phe, His, Leu, Met, Gln, Arg, Ser, Thr, Trp or Tyr
  MOD_RES (30)...(30): Xaa = Ala, Asp, Glu, Phe, Gly, His, Ile, Lys, Leu, Met, Asn, Gln, Arg, Ser, Thr, Val or Tyr
  MOD_RES (31)...(31): Xaa = Ala, Phe, Gly, Ile, Lys, Leu, Met, Pro, Gln, Arg, Ser, Thr, Val, Trp or Tyr
  MOD_RES (32)...(32): Xaa = Ala, Asp, Glu, Phe, Gly, His, Lys, Leu, Met, Asn, Pro, Gln, Arg, Ser, Thr, Val or Trp
  MOD_RES (33)...(33): Xaa = Ala, Asp, Glu, Gly, Ile, Lys, Leu, Met, Asn, Pro, Gln, Arg, Ser, Thr, Val or Tyr
  MOD_RES (34)...(34): Xaa = Ala, Asp, Glu, Phe, Gly, His, Ile, Lys, Leu, Met, Asn, Gln, Ser, Thr or Val
  MOD_RES (35)...(35): Xaa = Glu, Phe, Gly, His, Ile, Lys, Leu, Met, Asn, Pro, Gln, Arg, Ser, Thr or Trp
  MOD_RES (36)...(36): Xaa = Ala, Asp, Glu, Phe, Gly, His, Lys, Leu, Met, Asn, Pro, Gln, Arg, Ser, Thr, Val or Tyr
  MOD_RES (37)...(37): Xaa = Ala, Asp, Glu, Phe, Gly, His, Ile, Lys, Met, Asn, Gln, Arg, Ser, Thr, Val or Tyr
CXXXXXCXXXXXCXXXXXXXXXCXCXXXXXXXXXXXXC

SEQ ID NO: 319 - protein, 35 aa, Artificial Sequence
  EGF domain monomer sequence
  MOD_RES (2)...(2): Xaa = Ala, Asp, Glu, Phe, Gly, Ile, Lys, Leu, Met, Asn, Pro, Gln, Arg, Ser, Thr, Val or Tyr
  MOD_RES (3)...(3): Xaa = Ala, Asp, Glu, Phe, Gly, His, Ile, Lys, Leu, Met, Asn, Pro, Gln, Arg, Ser, Thr, Val or Tyr
  MOD_RES (4)...(4): Xaa = Ala, Asp, Glu, Phe, Gly, His, Ile, Lys, Leu, Met, Asn, Pro, Gln, Arg, Ser, Thr, Val or Trp
  MOD_RES (5)...(5): Xaa = Ala, Asp, Glu, Phe, Gly, His, Ile, Lys, Leu, Met, Asn, Pro, Gln, Arg, Ser, Thr or Val
  MOD_RES (6)...(6): Xaa = Ala, Asp, Glu, Phe, Gly, His, Ile, Lys, Leu, Asn, Pro, Gln, Arg, Ser, Val or Tyr
  MOD_RES (7)...(7): Xaa = Ala, Asp, Glu, Gly, Ile, Lys, Leu, Met, Asn, Pro, Gln, Arg, Ser, Thr, Val or Tyr
  MOD_RES (9)...(9): Xaa = Ala, Cys, Asp, Glu, Phe, Gly, His, Lys, Leu, Met, Asn, Pro, Gln, Arg, Ser, Val or Tyr
  MOD_RES (10)...(10): Xaa = Ala, Asp, Glu, Gly, His, Ile, Lys, Leu, Met, Asn, Pro, Gln, Arg, Ser, Thr, Val or Tyr
  MOD_RES (11)...(11): Xaa = Ala, Asp, Glu, Phe, Gly, His, Lys, Leu, Asn, Gln, Arg, Ser, Thr or Tyr
  MOD_RES (12)...(12): Xaa = Ala, Phe, Gly, His, Gln, Ser, Thr or Val
  MOD_RES (13)...(13): Xaa = Ala, Asp, Glu, Phe, His, Ile, Lys, Leu, Met, Asn, Gln, Arg, Ser, Thr or Val
  MOD_RES (15)...(15): Xaa = Ala, Asp, Phe, His, Ile, Lys, Leu, Met, Asn, Gln, Arg, Ser, Thr, Val or Tyr
  MOD_RES (16)...(16): Xaa = Ala, Asp, Glu, Phe, His, Leu, Met, Asn, Pro, Gln, Arg, Ser, Val or Tyr
  MOD_RES (17)...(17): Xaa = Ala, Asp, Glu, Phe, Gly, His, Leu, Asn, Arg, Ser, Thr, Val or Tyr
  MOD_RES (18)...(18): Xaa = Ala, Asp, Glu, Gly, Asn, Pro, Gln, Arg, Ser or Thr
  MOD_RES (19)...(19): Xaa = Ala, Asp, Glu, Phe, Gly, Lys, Leu, Asn, Pro, Gln, Arg, Ser or Thr
  MOD_RES (20)...(20): Xaa = Ala, Asp, Glu, Gly, Met, Asn, Arg, Ser, Thr, Val or Tyr
  MOD_RES (21)...(21): Xaa = Ala, Asp, Glu, Gly, Lys, Leu, Met, Gln, Arg, Ser or Thr
  MOD_RES (22)...(22): Xaa = Phe, His, Ile, Pro, Arg, Val, Trp or Tyr
  MOD_RES (23)...(23): Xaa = Ala, Glu, His, Lys, Leu, Gln, Ser, Thr, Val or Tyr
  MOD_RES (25)...(25): Xaa = Ala, Asp, Glu, Phe, Gly, His, Ile, Lys, Leu, Met, Asn, Pro, Gln, Arg, Ser, Thr, Val, Trp or Tyr
  MOD_RES (27)...(27): Xaa = Ala, Asp, Glu, Phe, His, Lys, Leu, Met, Asn, Pro, Gln, Arg, Ser, Thr, Val, Trp or Tyr
  MOD_RES (28)...(28): Xaa = Ala, Asp, Glu, Phe, Gly, His, Lys, Leu, Asn, Pro, Gln, Arg, Ser, Thr, Val or Tyr
  MOD_RES (29)...(29): Xaa = Ala, Glu, Gly, His, Lys, Leu, Asn, Pro, Arg, Ser, Thr or Tyr
  MOD_RES (30)...(30): Xaa = Phe, His, Ile, Leu, Met, Arg, Thr, Trp or Tyr
  MOD_RES (31)...(31): Xaa = Ala, Asp, Glu, Phe, Gly, His, Ile, Lys, Leu, Met, Asn, Gln, Arg, Ser, Thr, Val or Tyr
  MOD_RES (32)...(32): Xaa = Asp, Gly or Ser
  MOD_RES (33)...(33): Xaa = Ala, Asp, Glu, Phe, His, Ile, Lys, Leu, Asn, Pro, Gln, Arg, Ser, Thr, Val or Tyr
  MOD_RES (34)...(34): Xaa = Ala, Asp, Glu, Phe, His, Ile, Lys, Leu, Met, Asn, Gln, Arg, Ser, Thr or Tyr
CXXXXXXCXXXXXCXXXXXXXXXCXCXXXXXXXXC

SEQ ID NO: 320 - protein, 36 aa, Artificial Sequence
  EGF domain monomer sequence
  MOD_RES (2)...(2): Xaa = Ala, Asp, Glu, Phe, Gly, Ile, Lys, Leu, Met, Asn, Pro, Gln, Arg, Ser, Thr, Val or Tyr
  MOD_RES (3)...(3): Xaa = Ala, Asp, Glu, Phe, Gly, His, Ile, Lys, Leu, Met, Asn, Pro, Gln, Arg, Ser, Thr, Val or Tyr
  MOD_RES (4)...(4): Xaa = Ala, Asp, Glu, Phe, Gly, His, Ile, Lys, Leu, Met, Asn, Pro, Gln, Arg, Ser, Thr, Val or Trp
  MOD_RES (5)...(5): Xaa = Ala, Asp, Glu, Phe, Gly, His, Ile, Lys, Leu, Met, Asn, Pro, Gln, Arg, Ser, Thr or Val
  MOD_RES (6)...(6): Xaa = Ala, Asp, Glu, Phe, Gly, His, Ile, Lys, Leu, Asn, Pro, Gln, Arg, Ser, Val or Tyr
  MOD_RES (7)...(7): Xaa = Ala, Asp, Glu, Gly, Ile, Lys, Leu, Met, Asn, Pro, Gln, Arg, Ser, Thr, Val or Tyr
  MOD_RES (9)...(9): Xaa = Ala, Cys, Asp, Glu, Phe, Gly, His, Lys, Leu, Met, Asn, Pro, Gln, Arg, Ser, Val or Tyr
  MOD_RES (10)...(10): Xaa = Ala, Asp, Glu, Gly, His, Ile, Lys, Leu, Met, Asn, Pro, Gln, Arg, Ser, Thr, Val or Tyr
  MOD_RES (11)...(11): Xaa = Ala, Asp, Glu, Phe, Gly, His, Lys, Leu, Asn, Gln, Arg, Ser, Thr or Tyr
  MOD_RES (12)...(12): Xaa = Ala, Phe, Gly, His, Gln, Ser, Thr or Val
  MOD_RES (13)...(13): Xaa = Ala, Asp, Glu, Phe, His, Ile, Lys, Leu, Met, Asn, Gln, Arg, Ser, Thr or Val
  MOD_RES (15)...(15): Xaa = Ala, Asp, Phe, His, Ile, Lys, Leu, Met, Asn, Gln, Arg, Ser, Thr, Val or Tyr
  MOD_RES (16)...(16): Xaa = Ala, Asp, Glu, Phe, His, Leu, Met, Asn, Pro, Gln, Arg, Ser, Val or Tyr
  MOD_RES (17)...(17): Xaa = Ala, Asp, Glu, Phe, Gly, His, Leu, Asn, Arg, Ser, Thr, Val or Tyr
  MOD_RES (18)...(18): Xaa = Ala, Asp, Glu, Gly, Asn, Pro, Gln, Arg, Ser or Thr
  MOD_RES (19)...(19): Xaa = Ala, Asp, Glu, Phe, Gly, Lys, Leu, Asn, Pro, Gln, Arg, Ser or Thr
  MOD_RES (20)...(20): Xaa = Ala, Asp, Glu, Gly, Met, Asn, Arg, Ser, Thr, Val or Tyr
  MOD_RES (21)...(21): Xaa = Ala, Asp, Glu, Gly, Lys, Leu, Met, Gln, Arg, Ser or Thr
  MOD_RES (22)...(22): Xaa = Phe, His, Ile, Pro, Arg, Val, Trp or Tyr
  MOD_RES (23)...(23): Xaa = Ala, Glu, His, Lys, Leu, Gln, Ser, Thr, Val or Tyr
  MOD_RES (25)...(25): Xaa = Ala, Asp, Glu, Phe, Gly, His, Ile, Lys, Leu, Met, Asn, Pro, Gln, Arg, Ser, Thr, Val, Trp or Tyr
  MOD_RES (27)...(27): Xaa = Ala, Asp, Glu, Phe, Gly, His, Ile, Lys, Leu, Asn, Pro, Gln, Arg, Ser, Thr, Val or Tyr
  MOD_RES (28)...(28): Xaa = Ala, Asp, Glu, Phe, His, Ile, Lys, Leu, Met, Asn, Pro, Gln, Arg, Ser, Thr or Val
  MOD_RES (29)...(29): Xaa = Asp, Glu, Gly, Asn, Pro or Ser
  MOD_RES (30)...(30): Xaa = Ala, Asp, Glu, Phe, His, Leu, Met, Gln, Arg, Ser, Thr, Trp or Tyr
  MOD_RES (31)...(31): Xaa = Ala, Asp, Glu, Phe, Gly, His, Ile, Lys, Leu, Met, Asn, Gln, Arg, Ser, Thr, Val or Tyr
  MOD_RES (32)...(32): Xaa = Ala, Phe, Gly, Ile, Lys, Leu, Met, Pro, Gln, Arg, Ser, Thr, Val, Trp or Tyr
  MOD_RES (33)...(33): Xaa = Ala, Asp, Glu, Phe, Gly, His, Lys, Leu, Met, Asn, Pro, Gln, Arg, Ser, Thr, Val or Trp
  MOD_RES (34)...(34): Xaa = Ala, Asp, Glu, Gly, Ile, Lys, Leu, Met, Asn, Pro, Gln, Arg, Ser, Thr, Val or Tyr
  MOD_RES (35)...(35): Xaa = Ala, Asp, Glu, Phe, Gly, His, Ile, Lys, Leu, Met, Asn, Gln, Ser, Thr or Val
CXXXXXXCXXXXXCXXXXXXXXXCXCXXXXXXXXXC

SEQ ID NO: 321 - protein, 37 aa, Artificial Sequence
  EGF domain monomer sequence
  MOD_RES (2)...(2): Xaa = Ala, Asp, Glu, Phe, Gly, Ile, Lys, Leu, Met, Asn, Pro, Gln, Arg, Ser, Thr, Val or Tyr
  MOD_RES (3)...(3): Xaa = Ala, Asp, Glu, Phe, Gly, His, Ile, Lys, Leu, Met, Asn, Pro, Gln, Arg, Ser, Thr, Val or Tyr
  MOD_RES (4)...(4): Xaa = Ala, Asp, Glu, Phe, Gly, His, Ile, Lys, Leu, Met, Asn, Pro, Gln, Arg, Ser, Thr, Val or Trp
  MOD_RES (5)...(5): Xaa = Ala, Asp, Glu, Phe, Gly, His, Ile, Lys, Leu, Met, Asn, Pro, Gln, Arg, Ser, Thr or Val
  MOD_RES (6)...(6): Xaa = Ala, Asp, Glu, Phe, Gly, His, Ile, Lys, Leu, Asn, Pro, Gln, Arg, Ser, Val or Tyr
  MOD_RES (7)...(7): Xaa = Ala, Asp, Glu, Gly, Ile, Lys, Leu, Met, Asn, Pro, Gln, Arg, Ser, Thr, Val or Tyr
  MOD_RES (9)...(9): Xaa = Ala, Cys, Asp, Glu, Phe, Gly, His, Lys, Leu, Met, Asn, Pro, Gln, Arg, Ser, Val or Tyr
  MOD_RES (10)...(10): Xaa = Ala, Asp, Glu, Gly, His, Ile, Lys, Leu, Met, Asn, Pro, Gln, Arg, Ser, Thr, Val or Tyr
  MOD_RES (11)...(11): Xaa = Ala, Asp, Glu, Phe, Gly, His, Lys, Leu, Asn, Gln, Arg, Ser, Thr or Tyr
  MOD_RES (12)...(12): Xaa = Ala, Phe, Gly, His, Gln, Ser, Thr or Val
  MOD_RES (13)...(13): Xaa = Ala, Asp, Glu, Phe, His, Ile, Lys, Leu, Met, Asn, Gln, Arg, Ser, Thr or Val
  MOD_RES (15)...(15): Xaa = Ala, Asp, Phe, His, Ile, Lys, Leu, Met, Asn, Gln, Arg, Ser, Thr, Val or Tyr
  MOD_RES (16)...(16): Xaa = Ala, Asp, Glu, Phe, His, Leu, Met, Asn, Pro, Gln, Arg, Ser, Val or Tyr
  MOD_RES (17)...(17): Xaa = Ala, Asp, Glu, Phe, Gly, His, Leu, Asn, Arg, Ser, Thr, Val or Tyr
  MOD_RES (18)...(18): Xaa = Ala, Asp, Glu, Gly, Asn, Pro, Gln, Arg, Ser or Thr
  MOD_RES (19)...(19): Xaa = Ala, Asp, Glu, Phe, Gly, Lys, Leu, Asn, Pro, Gln, Arg, Ser or Thr
  MOD_RES (20)...(20): Xaa = Ala, Asp, Glu, Gly, Met, Asn, Arg, Ser, Thr, Val or Tyr
  MOD_RES (21)...(21): Xaa = Ala, Asp, Glu, Gly, Lys, Leu, Met, Gln, Arg, Ser or Thr
  MOD_RES (22)...(22): Xaa = Phe, His, Ile, Pro, Arg, Val, Trp or Tyr
  MOD_RES (23)...(23): Xaa = Ala, Glu, His, Lys, Leu, Gln, Ser, Thr, Val or Tyr
  MOD_RES (25)...(25): Xaa = Ala, Asp, Glu, Phe, Gly, His, Ile, Lys, Leu, Met, Asn, Pro, Gln, Arg, Ser, Thr, Val, Trp or Tyr
  MOD_RES (27)...(27): Xaa = Ala, Asp, Glu, Phe, Gly, His, Ile, Lys, Leu, Asn, Pro, Gln, Arg, Ser, Thr, Val or Tyr
  MOD_RES (28)...(28): Xaa = Ala, Asp, Glu, Phe, His, Ile, Lys, Leu, Met, Asn, Pro, Gln, Arg, Ser, Thr or Val
  MOD_RES (29)...(29): Xaa = Asp, Glu, Gly, Asn, Pro or Ser
  MOD_RES (30)...(30): Xaa = Ala, Asp, Glu, Phe, His, Leu, Met, Gln, Arg, Ser, Thr, Trp or Tyr
  MOD_RES (31)...(31): Xaa = Ala, Asp, Glu, Phe, Gly, His, Ile, Lys, Leu, Met, Asn, Gln, Arg, Ser, Thr, Val or Tyr
  MOD_RES (32)...(32): Xaa = Ala, Phe, Gly, Ile, Lys, Leu, Met, Pro, Gln, Arg, Ser, Thr, Val, Trp or Tyr
  MOD_RES (33)...(33): Xaa = Ala, Asp, Glu, Phe, Gly, His, Lys, Leu, Met, Asn, Pro, Gln, Arg, Ser, Thr, Val or Trp
  MOD_RES (34)...(34): Xaa = Ala, Asp, Glu, Gly, Ile, Lys, Leu, Met, Asn, Pro, Gln, Arg, Ser, Thr, Val or Tyr
  MOD_RES (35)...(35): Xaa = Ala, Asp, Glu, Phe, Gly, His, Ile, Lys, Leu, Met, Asn, Gln, Ser, Thr or Val
  MOD_RES (36)...(36): Xaa = Glu, Phe, Gly, His, Ile, Lys, Leu, Met, Asn, Pro, Gln, Arg, Ser, Thr or Trp
CXXXXXXCXXXXXCXXXXXXXXXCXCXXXXXXXXXXC

SEQ ID NO: 322 - protein, 38 aa, Artificial Sequence
  EGF domain monomer sequence
  MOD_RES (2)...(2): Xaa = Ala, Asp, Glu, Phe, Gly, Ile, Lys, Leu, Met, Asn, Pro, Gln, Arg, Ser, Thr, Val or Tyr
  MOD_RES (3)...(3): Xaa = Ala, Asp, Glu, Phe, Gly, His, Ile, Lys, Leu, Met, Asn, Pro, Gln, Arg, Ser, Thr, Val or Tyr
  MOD_RES (4)...(4): Xaa = Ala, Asp, Glu, Phe, Gly, His, Ile, Lys, Leu, Met, Asn, Pro, Gln, Arg, Ser, Thr, Val or Trp
  MOD_RES (5)...(5): Xaa = Ala, Asp, Glu, Phe, Gly, His, Ile, Lys, Leu, Met, Asn, Pro, Gln, Arg, Ser, Thr or Val
  MOD_RES (6)...(6): Xaa = Ala, Asp, Glu, Phe, Gly, His, Ile, Lys, Leu, Asn, Pro, Gln, Arg, Ser, Val or Tyr
  MOD_RES (7)...(7): Xaa = Ala, Asp, Glu, Gly, Ile, Lys, Leu, Met, Asn, Pro, Gln, Arg, Ser, Thr, Val or Tyr
  MOD_RES (9)...(9): Xaa = Ala, Cys, Asp, Glu, Phe, Gly, His, Lys, Leu, Met, Asn, Pro, Gln, Arg, Ser, Val or Tyr
  MOD_RES (10)...(10): Xaa = Ala, Asp, Glu, Gly, His, Ile, Lys, Leu, Met, Asn, Pro, Gln, Arg, Ser, Thr, Val or Tyr
  MOD_RES (11)...(11): Xaa = Ala, Asp, Glu, Phe, Gly, His, Lys, Leu, Asn, Gln, Arg, Ser, Thr or Tyr
  MOD_RES (12)...(12): Xaa = Ala, Phe, Gly, His, Gln, Ser, Thr or Val
  MOD_RES (13)...(13): Xaa = Ala, Asp, Glu, Phe, His, Ile, Lys, Leu, Met, Asn, Gln, Arg, Ser, Thr or Val
  MOD_RES (15)...(15): Xaa = Ala, Asp, Phe, His, Ile, Lys, Leu, Met, Asn, Gln, Arg, Ser, Thr, Val or Tyr
  MOD_RES (16)...(16): Xaa = Ala, Asp, Glu, Phe, His, Leu, Met, Asn, Pro, Gln, Arg, Ser, Val or Tyr
  MOD_RES (17)...(17): Xaa = Ala, Asp, Glu, Phe, Gly, His, Leu, Asn, Arg, Ser, Thr, Val or Tyr
  MOD_RES (18)...(18): Xaa = Ala, Asp, Glu, Gly, Asn, Pro, Gln, Arg, Ser or Thr
  MOD_RES (19)...(19): Xaa = Ala, Asp, Glu, Phe, Gly, Lys, Leu, Asn, Pro, Gln, Arg, Ser or Thr
  MOD_RES (20)...(20): Xaa = Ala, Asp, Glu, Gly, Met, Asn, Arg, Ser, Thr, Val or Tyr
  MOD_RES (21)...(21): Xaa = Ala, Asp, Glu, Gly, Lys, Leu, Met, Gln, Arg, Ser or Thr
  MOD_RES (22)...(22): Xaa = Phe, His, Ile, Pro, Arg, Val, Trp or Tyr
  MOD_RES (23)...(23): Xaa = Ala, Glu, His, Lys, Leu, Gln, Ser, Thr, Val or Tyr
  MOD_RES (25)...(25): Xaa = Ala, Asp, Glu, Phe, Gly, His, Ile, Lys, Leu, Met, Asn, Pro, Gln, Arg, Ser, Thr, Val, Trp or Tyr
  MOD_RES (27)...(27): Xaa = Ala, Asp, Glu, Phe, Gly, His, Ile, Lys, Leu, Asn, Pro, Gln, Arg, Ser, Thr, Val or Tyr
  MOD_RES (28)...(28): Xaa = Ala, Asp, Glu, Phe, His, Ile, Lys, Leu, Met, Asn, Pro, Gln, Arg, Ser, Thr or Val
  MOD_RES (29)...(29): Xaa = Asp, Glu, Gly, Asn, Pro or Ser
  MOD_RES (30)...(30): Xaa = Ala, Asp, Glu, Phe, His, Leu, Met, Gln, Arg, Ser, Thr, Trp or Tyr
  MOD_RES (31)...(31): Xaa = Ala, Asp, Glu, Phe, Gly, His, Ile, Lys, Leu, Met, Asn, Gln, Arg, Ser, Thr, Val or Tyr
  MOD_RES (32)...(32): Xaa = Ala, Phe, Gly, Ile, Lys, Leu, Met, Pro, Gln, Arg, Ser, Thr, Val, Trp or Tyr
  MOD_RES (33)...(33): Xaa = Ala, Asp, Glu, Phe, Gly, His, Lys, Leu, Met, Asn, Pro, Gln, Arg, Ser, Thr, Val or Trp
  MOD_RES (34)...(34): Xaa = Ala, Asp, Glu, Gly, Ile, Lys, Leu, Met, Asn, Pro, Gln, Arg, Ser, Thr, Val or Tyr
  MOD_RES (35)...(35): Xaa = Ala, Asp, Glu, Phe, Gly, His, Ile, Lys, Leu, Met, Asn, Gln, Ser, Thr or Val
  MOD_RES (36)...(36): Xaa = Glu, Phe, Gly, His, Ile, Lys, Leu, Met, Asn, Pro, Gln, Arg, Ser, Thr or Trp
  MOD_RES (37)...(37): Xaa = Ala, Asp, Glu, Phe, Gly, His, Lys, Leu, Met, Asn, Pro, Gln, Arg, Ser, Thr, Val or Tyr
CXXXXXXCXXXXXCXXXXXXXXXCXCXXXXXXXXXXXC

SEQ ID NO: 323 - protein, 39 aa, Artificial Sequence
  EGF domain monomer sequence
  MOD_RES (2)...(2): Xaa = Ala, Asp, Glu, Phe, Gly, Ile, Lys, Leu, Met, Asn, Pro, Gln, Arg, Ser, Thr, Val or Tyr
  MOD_RES (3)...(3): Xaa = Ala, Asp, Glu, Phe, Gly, His, Ile, Lys, Leu, Met, Asn, Pro, Gln, Arg, Ser, Thr, Val or Tyr
  MOD_RES (4)...(4): Xaa = Ala, Asp, Glu, Phe, Gly, His, Ile, Lys, Leu, Met, Asn, Pro, Gln, Arg, Ser, Thr, Val or Trp
  MOD_RES (5)...(5): Xaa = Ala, Asp, Glu, Phe, Gly, His, Ile, Lys, Leu, Met, Asn, Pro, Gln, Arg, Ser, Thr or Val
  MOD_RES (6)...(6): Xaa = Ala, Asp, Glu, Phe, Gly, His, Ile, Lys, Leu, Asn, Pro, Gln, Arg, Ser, Val or Tyr
  MOD_RES (7)...(7): Xaa = Ala, Asp, Glu, Gly, Ile, Lys, Leu, Met, Asn, Pro, Gln, Arg, Ser, Thr, Val or Tyr
  MOD_RES (9)...(9): Xaa = Ala, Cys, Asp, Glu, Phe, Gly, His, Lys, Leu, Met, Asn, Pro, Gln, Arg, Ser, Val or Tyr
  MOD_RES (10)...(10): Xaa = Ala, Asp, Glu, Gly, His, Ile, Lys, Leu, Met, Asn, Pro, Gln, Arg, Ser, Thr, Val or Tyr
  MOD_RES (11)...(11): Xaa = Ala, Asp, Glu, Phe, Gly, His, Lys, Leu, Asn, Gln, Arg, Ser, Thr or Tyr
  MOD_RES (12)...(12): Xaa = Ala, Phe, Gly, His, Gln, Ser, Thr or Val
  MOD_RES (13)...(13): Xaa = Ala, Asp, Glu, Phe, His, Ile, Lys, Leu, Met, Asn, Gln, Arg, Ser, Thr or Val
  MOD_RES (15)...(15): Xaa = Ala, Asp, Phe, His, Ile, Lys, Leu, Met, Asn, Gln, Arg, Ser, Thr, Val or Tyr
  MOD_RES (16)...(16): Xaa = Ala, Asp, Glu, Phe, His, Leu, Met, Asn, Pro, Gln, Arg, Ser, Val or Tyr
  MOD_RES (17)...(17): Xaa = Ala, Asp, Glu, Phe, Gly, His, Leu, Asn, Arg, Ser, Thr, Val or Tyr
  MOD_RES (18)...(18): Xaa = Ala, Asp, Glu, Gly, Asn, Pro, Gln, Arg, Ser or Thr
  MOD_RES (19)...(19): Xaa = Ala, Asp, Glu, Phe, Gly, Lys, Leu, Asn, Pro, Gln, Arg, Ser or Thr
  MOD_RES (20)...(20): Xaa = Ala, Asp, Glu, Gly, Met, Asn, Arg, Ser, Thr, Val or Tyr
  MOD_RES (21)...(21): Xaa = Ala, Asp, Glu, Gly, Lys, Leu, Met, Gln, Arg, Ser or Thr
  MOD_RES (22)...(22): Xaa = Phe, His, Ile, Pro, Arg, Val, Trp or Tyr
  MOD_RES (23)...(23): Xaa = Ala, Glu, His, Lys, Leu, Gln, Ser, Thr, Val or Tyr
  MOD_RES (25)...(25): Xaa = Ala, Asp, Glu, Phe, Gly, His, Ile, Lys, Leu, Met, Asn, Pro, Gln, Arg, Ser, Thr, Val, Trp or Tyr
  MOD_RES (27)...(27): Xaa = Ala, Asp, Glu, Phe, Gly, His, Ile, Lys, Leu, Asn, Pro, Gln, Arg, Ser, Thr, Val or Tyr
  MOD_RES (28)...(28): Xaa = Ala, Asp, Glu, Phe, His, Ile, Lys, Leu, Met, Asn, Pro, Gln, Arg, Ser, Thr or Val
  MOD_RES (29)...(29): Xaa = Asp, Glu, Gly, Asn, Pro or Ser
  MOD_RES (30)...(30): Xaa = Ala, Asp, Glu, Phe, His, Leu, Met, Gln, Arg, Ser, Thr, Trp or Tyr
  MOD_RES (31)...(31): Xaa = Ala, Asp, Glu, Phe, Gly, His, Ile, Lys, Leu, Met, Asn, Gln, Arg, Ser, Thr, Val or Tyr
  MOD_RES (32)...(32): Xaa = Ala, Phe, Gly, Ile, Lys, Leu, Met, Pro, Gln, Arg, Ser, Thr, Val, Trp or Tyr
  MOD_RES (33)...(33): Xaa = Ala, Asp, Glu, Phe, Gly, His, Lys, Leu, Met, Asn, Pro, Gln, Arg, Ser, Thr, Val or Trp
  MOD_RES (34)...(34): Xaa = Ala, Asp, Glu, Gly, Ile, Lys, Leu, Met, Asn, Pro, Gln, Arg, Ser, Thr, Val or Tyr
  MOD_RES (35)...(35): Xaa = Ala, Asp, Glu, Phe, Gly, His, Ile, Lys, Leu, Met, Asn, Gln, Ser, Thr or Val
  MOD_RES (36)...(36): Xaa = Glu, Phe, Gly, His, Ile, Lys, Leu, Met, Asn, Pro, Gln, Arg, Ser, Thr or Trp
  MOD_RES (37)...(37): Xaa = Ala, Asp, Glu, Phe, Gly, His, Lys, Leu, Met, Asn, Pro, Gln, Arg, Ser, Thr, Val or Tyr
  MOD_RES (38)...(38): Xaa = Ala, Asp, Glu, Phe, Gly, His, Ile, Lys, Met, Asn, Gln, Arg, Ser, Thr, Val or Tyr
CXXXXXXCXXXXXCXXXXXXXXXCXCXXXXXXXXXXXXC

SEQ ID NO: 324 - protein, 35 aa, Artificial Sequence
  LDL-receptor A domain consensus
  MOD_RES (1)...(35): Xaa = any amino acid
  DISULFID (1)...(13)
  DISULFID (8)...(26)
  DISULFID (20)...(35)
CXXXXFXCXXGXCIXXXXXCDGXXDCXDXSDEXXC

SEQ ID NO: 325 - protein, 35 aa, Artificial Sequence
  conserved amino acids in an A-domain
  MOD_RES (2)...(5): Xaa = any amino acid
  MOD_RES (6)...(6): Xaa = hydrophobic amino acid
  MOD_RES (7)...(7): Xaa = any amino acid
  MOD_RES (9)...(12): Xaa = any amino acid
  MOD_RES (14)...(14): Xaa = hydrophobic amino acid
  MOD_RES (15)...(17): Xaa = any amino acid
  MOD_RES (18)...(18): Xaa = hydrophobic amino acid
  MOD_RES (19)...(19): Xaa = any amino acid
  MOD_RES (21)...(21): Xaa = negatively charged amino acid
  MOD_RES (22)...(24): Xaa = any amino acid
  MOD_RES (25)...(25): Xaa = negatively charged amino acid
  MOD_RES (27)...(30): Xaa = any amino acid
  MOD_RES (31)...(32): Xaa = negatively charged amino acid
  MOD_RES (33)...(34): Xaa = any amino acid
  DISULFID (1)...(13)
  DISULFID (8)...(26)
  DISULFID (20)...(35)
CXXXXXXCXXXXCXXXXXXCXXXXXCXXXXXXXXC

SEQ ID NO: 326 - protein, 41 aa, Artificial Sequence
  exemplary A domain
  MOD_RES (2)...(2): Xaa = Val, Leu, Gly, Pro, Ala, Glu, Gln or Arg
  MOD_RES (3)...(3): Xaa = Ala, Pro or Ser
  MOD_RES (4)...(4): Xaa = Asp, Asn, Gly or Ser
  MOD_RES (7)...(7): Xaa = Thr, Pro, Arg, Lys or Gln
  MOD_RES (9)...(9): Xaa = Gly, Ser, Asp, Glu, Asn, Lys or Arg
  MOD_RES (10)...(10): Xaa = Asn or Ser
  MOD_RES (12)...(12): Xaa = His, Gln or Arg
  MOD_RES (15)...(15): Xaa = Pro or Ser
  MOD_RES (16)...(16): Xaa = Val, Leu, Gly, Pro, Ala, Glu, Gln or Arg
  MOD_RES (17)...(17): Xaa = Ala, Ser, Glu, Asn, His or Arg
  MOD_RES (18)...(18): Xaa = Leu or Trp
  MOD_RES (19)...(19): Xaa = Leu, Val, Gly or Arg
  MOD_RES (23)...(23): Xaa = Val, Asp or Glu
  MOD_RES (24)...(24): Xaa = Pro, Asn or Asp
  MOD_RES (27)...(27): Xaa = Ala, Pro, Gly, Glu, Gln or Arg
  MOD_RES (29)...(29): Xaa = Asn or Gly
  MOD_RES (33)...(33): Xaa = Leu, Val, Met, Glu, Gln or Lys
  MOD_RES (34)...(34): Xaa = Gly, Ser, Asn or Asp
  MOD_RES (36)...(36): Xaa = Ala, Pro, Thr, Gln, Glu or Lys
  MOD_RES (37)...(38): Xaa = Ala, Asp, Glu, Gly, His, Ile, Lys, Leu, Asn, Pro, Gln, Arg, Ser, Thr or Val
  MOD_RES (39)...(39): Xaa = Ser, Gly or Arg
  MOD_RES (40)...(40): Xaa = His, Pro or Arg
CXXXZFXCXXGXCIXXXXXCDGXXDCXDXSDEXXCXXXXXT

SEQ ID NO: 327 - protein, 35 aa, Artificial Sequence; identical to SEQ ID NO: 325
  A domain
  MOD_RES (1)...(35): Xaa = any amino acid

SEQ ID NO: 328 - protein, 35 aa, Artificial Sequence
  DA4/1 selected clone 1
CRADQFKCENGQCIPARLRCDGDPDCPDNSDELNC

SEQ ID NO: 329 - protein, 35 aa, Artificial Sequence
  DH3/2 selected clone 2
CLADQFTCKNGHCIPRAWLCDGVGDCPDDSDEVGC

SEQ ID NO: 330 - protein, 28 aa, Artificial Sequence
  A domain typical consensus sequence representing portion beginning at third Cys
  MOD_RES (2)...(2): Xaa = Val, Ile, Leu, Met or Ala
  MOD_RES (3)...(7): Xaa = any amino acid
  MOD_RES (9)...(9): Xaa = Asp, Asn or His
  MOD_RES (10)...(12): Xaa = any amino acid
  MOD_RES (13)...(13): Xaa = Asp, Glu, Asn, Gln, His or Thr
  MOD_RES (15)...(18): Xaa = any amino acid, Xaa at position 18 may be present or absent
  MOD_RES (19)...(19): Xaa = Ser, Thr, Ala, Asp or Glu
  MOD_RES (20)...(20): Xaa = Asp, Glu or His
  MOD_RES (21)...(21): Xaa = Asp or Glu
  MOD_RES (22)...(26): Xaa = any amino acid, Xaa at positions 23-26 may be present or absent
CXXXXXXCXXXXXCXXXXXXXXXXXXXC

SEQ ID NO: 331 - protein, 64 aa, Artificial Sequence; identical to SEQ ID NO: 220
  A domain second consensus sequence spanning all six Cys residues
  MOD_RES (2)...(16): Xaa = any amino acid, Xaa at positions 4-16 may be present or absent
  MOD_RES (18)...(32): Xaa = any amino acid, Xaa at positions 22-32 may be present or absent
  MOD_RES (34)...(40): Xaa = any amino acid, Xaa at position 40 may be present or absent
  MOD_RES (43)...(45): Xaa = any amino acid, Xaa at position 18 may be present or absent
  MOD_RES (46)...(46): Xaa = Asp, Glu, Asn, Gln, His, Ser or Thr
  MOD_RES (48)...(53): Xaa = any amino acid, Xaa at positions 52 and 53 may be present or absent
  MOD_RES (56)...(63): Xaa = any amino acid, Xaa at positions 58-63 may be present or absent

SEQ ID NO: 332 - protein, 5 aa, Artificial Sequence
  peptide linker repeat
GGGGS

SEQ ID NO: 333 - protein, 15 aa, Artificial Sequence
  15mer peptide linker (Gly-4Ser)-3
GGGGSGGGGSGGGGS

SEQ ID NO: 334 - protein, 5 aa, Artificial Sequence
  simple linker repeated an unspecified number of times
GGGGS

SEQ ID NO: 335 - protein, 25 aa, Artificial Sequence
  flexible peptide linker, 1-25 Gly residues
  MOD_RES (2)...(25): Gly at positions 2-25 may be present or absent
GGGGGGGGGGGGGGGGGGGGGGGGG

SEQ ID NO: 336 - protein, 20 aa, Artificial Sequence
  flexible peptide linker, 5-20 Gly residues
  MOD_RES (6)...(20): Gly at positions 6-20 may be present or absent
GGGGGGGGGGGGGGGGGGGG

SEQ ID NO: 337 - protein, 15 aa, Artificial Sequence
  flexible peptide linker, 5-15 Gly residues
  MOD_RES (6)...(15): Gly at positions 6-15 may be present or absent
GGGGGGGGGGGGGGG

SEQ ID NO: 338 - protein, 12 aa, Artificial Sequence
  flexible peptide linker, 8-12 Gly residues
  MOD_RES (9)...(12): Gly at positions 9-12 may be present or absent
GGGGGGGGGGGG

SEQ ID NO: 339 - protein, 17 aa, Artificial Sequence
  specific peptide linker
  MOD_RES (2)...(5): Gly at positions 2-5 may be present or absent
  MOD_RES (6)...(6): Xaa = Ala, Val, Leu, Ile, Met, Phe, Trp, Pro, Gly, Ser, Thr, Cys, Tyr, Asn, Gln, Lys, Arg, His, Asp or Glu
  MOD_RES (8)...(11): Gly at positions 8-11 may be present or absent
  MOD_RES (12)...(12): Xaa = Ala, Val, Leu, Ile, Met, Phe, Trp, Pro, Gly, Ser, Thr, Cys, Tyr, Asn, Gln, Lys, Arg, His, Asp or Glu
  MOD_RES (14)...(17): Gly at positions 8-11 may be present or absent
GGGGGXGGGGGXGGGGG

SEQ ID NO: 340 - protein, 17 aa, Artificial Sequence
  specific peptide linker
  MOD_RES (2)...(5): Gly at positions 2-5 may be present or absent
  MOD_RES (6)...(6): Xaa = Ser, Ala or Thr
  MOD_RES (8)...(11): Gly at positions 8-11 may be present or absent
  MOD_RES (12)...(12): Xaa = Ser, Ala or Thr
  MOD_RES (14)...(17): Gly at positions 8-11 may be present or absent
GGGGGXGGGGGXGGGGG

SEQ ID NO: 341 - protein, 17 aa, Artificial Sequence
  specific peptide linker
  MOD_RES (2)...(5): Gly at positions 2-5 may be present or absent
  MOD_RES (8)...(11): Gly at positions 8-11 may be present or absent
  MOD_RES (14)...(17): Gly at positions 8-11 may be present or absent
GGGGGSGGGGGSGGGGG

SEQ ID NO: 342 - protein, 11 aa, Artificial Sequence
  peptide linker
  MOD_RES (4)...(4): Xaa = Ala, Val, Leu, Ile, Met, Phe, Trp, Pro, Gly, Ser, Thr, Cys, Tyr, Asn, Gln, Lys, Arg, His, Asp or Glu
  MOD_RES (8)...(8): Xaa = Ala, Val, Leu, Ile, Met, Phe, Trp, Pro, Gly, Ser, Thr, Cys, Tyr, Asn, Gln, Lys, Arg, His, Asp or Glu
GGGXGGGXGGG

SEQ ID NO: 343 - protein, 11 aa, Artificial Sequence
  peptide linker
  MOD_RES (4)...(4): Xaa = Ser, Ala or Thr
  MOD_RES (8)...(8): Xaa = Ser, Ala or Thr
GGGXGGGXGGG

SEQ ID NO: 344 - protein, 11 aa, Artificial Sequence
  peptide linker
GGGSGGGSGGG

SEQ ID NO: 345 - protein, 25 aa, Artificial Sequence
  specific peptide linker
  MOD_RES (2)...(12): Gly at positions 2-12 may be present or absent
  MOD_RES (15)...(25): Gly at positions 15-25 may be present or absent
GGGGGGGGGGGGCGGGGGGGGGGGG

SEQ ID NO: 346 - protein, 11 aa, Artificial Sequence
  peptide linker
GGGGGCGGGGG

SEQ ID NO: 347 - protein, 25 aa, Artificial Sequence
  specific proline-containing peptide linker
  MOD_RES (2)...(12): Pro at positions 2-12 may be present or absent
  MOD_RES (15)...(25): Pro at positions 15-25 may be present or absent
PPPPPPPPPPPPCPPPPPPPPPPPP

SEQ ID NO: 348 - protein, 11 aa, Artificial Sequence
  peptide linker
PPPPPCPPPPP

SEQ ID NO: 349 - protein, 19 aa, Artificial Sequence
  peptide linker comprising N-glycosylation site
  MOD_RES (2)...(8): Gly at positions 2-12 may be present or absent
  MOD_RES (10)...(10): Xaa = any amino acid except Pro
  MOD_RES (11)...(11): Xaa = Ser or Thr
  MOD_RES (13)...(19): Gly at positions 2-12 may be present or absent
GGGGGGGGNXXGGGGGGGG

SEQ ID NO: 350 - protein, 19 aa, Artificial Sequence
  peptide linker comprising N-glycosylation site
  MOD_RES (2)...(8): Gly at positions 2-12 may be present or absent
  MOD_RES (10)...(10): Xaa = any amino acid except Pro
  MOD_RES (13)...(19): Gly at positions 2-12 may be present or absent
GGGGGGGGNXTGGGGGGGG

SEQ ID NO: 351 - protein, 6 aa, Artificial Sequence
  A domain linker 6mer
  MOD_RES (1)...(1): Xaa = Ala, Pro, Thr, Gln, Glu or Lys
  MOD_RES (2)...(3): Xaa = any amino acid except Cys, Phe, Tyr, Trp or Met
  MOD_RES (4)...(4): Xaa = Ser, Gly or Arg
  MOD_RES (5)...(5): Xaa = His, Pro or Arg
XXXXXT

SEQ ID NO: 352 - protein, 40 aa, Artificial Sequence
  IG156 momomer domain
CLSSEFQCQSSGRCIPLAWVCDGDNDCRDDSDEKSCKPRT

SEQ ID NO: 353 - protein, 51 aa, Artificial Sequence
  RBCA monomer domain
CRSSQFQCNDSRICIPGRWRCDGDNDCQDGSDETGCGDSHILPFSTPGPST

SEQ ID NO: 354 - protein, 48 aa, Artificial Sequence
  RBCB monomer domain
CPAGEFPCKNGQCLPVTWLCDGVNDCLDGSDEKGCGRPGPGATSAPAA

SEQ ID NO: 355 - protein, 48 aa, Artificial Sequence
  RBC11 monomer domain
CPPDEFPCKNGQCIPQDWLCDGVNDCLDGSDEKDCGRPGPGATSAPAA

SEQ ID NO: 356 - protein, 41 aa, Artificial Sequence
  CSA-A8 monomer domain
CGAGQFPCKNGHCLPLNLLCDGVNDCEDNSDEPSELCKALT

SEQ ID NO: 357 - protein, 6 aa, Artificial Sequence
  6xHis, hexahistidine tag
HHHHHH

SEQ ID NO: 358 - DNA, 63 bp, Artificial Sequence
  5'-phosphorylated oligonucleotide loxP(K)
  modified_base (1)...(1): n = 5'-phosphorylated a
ngcttataacttcgtatagaaaggtatatacgaagttatagatctcgtgctgcatgcggtgcg

SEQ ID NO: 359 - DNA, 67 bp, Artificial Sequence
  5'-phosphorylated oligonucleotide loxP(K_rc)
  modified_base (1)...(1): n = 5'-phosphorylated a
nattcgcaccgcatgcagcacgagatctataacttcgtatatacctttctatacgaagttataagct

SEQ ID NO: 360 - DNA, 38 bp, Artificial Sequence
  5'-phosphorylated oligonucleotide loxP(L)
  modified_base (1)...(1): n = 5'-phosphorylated a
ntaacttcgtatagcatacattatacgaagttatcgag

SEQ ID NO: 361 - DNA, 39 bp, Artificial Sequence
  5'-phosphorylated oligonucleotide loxP(L_rc)
  modified_base (1)...(1): n = 5'-phosphorylated c
ntcgataacttcgtataatgtatgctatacgaagttatg

SEQ ID NO: 362 - DNA, 79 bp, Artificial Sequence
  5'-phosphorylated oligonucleotide loxP(I)
  modified_base (1)...(1): n = 5'-phosphorylated c
ncgggagcagggcatgctaagtgagtaataagtgagtaaataacttcgtatatacctttctatacgaagttatcgtctg

SEQ ID NO: 363 - DNA, 72 bp, Artificial Sequence
  5'-phosphorylated oligonucleotide loxP(I_rc)
  modified_base (0)...(0): n = 5'-phosphorylated a
ncgataacttcgtatagaaaggtatatacgaagttatttactcacttattactcacttagcatgccctgctc

SEQ ID NO: 364 - DNA, 59 bp, Artificial Sequence
  oligonucleotide loxP(J)
ccgggaccagtggcctctggggccataacttcgtatagcatacattatacgaagttatg

SEQ ID NO: 365 - DNA, 55 bp, Artificial Sequence
  oligonucleotide loxP(J_rc)
cataacttcgtataatgtatgctatacgaagttatggccccagaggccactggtc

SEQ ID NO: 366 - DNA, 30 bp, Artificial Sequence
  oligonucleotide gIIIPromoter_EcoRI
atggcgaattctcattgtcggcgcaactat

SEQ ID NO: 367 - DNA, 33 bp, Artificial Sequence
  oligonucleotide gIIIPromoter_HinDIII
gataagctttcattaagactccttattacgcag

SEQ ID NO: 368 - protein, 36 aa, Artificial Sequence
  human calcium binding epidermal growth factor (CaEGF) domain
  MOD_RES (1)...(1): Xaa = Val, Thr, Ile, Lys, Glu or Ala
  MOD_RES (3)...(3): Xaa = Val or Ile
  MOD_RES (7)...(7): Xaa = Val, Ser, Leu, Ala, Asp, Glu, Gly, Lys, Asn, Arg or Thr
  MOD_RES (8)...(8): Xaa = Ser, Pro, Glu, Leu, Gln or Val
  MOD_RES (9)...(9): Xaa = Ser, Gly, Asn, Asp, Ile or Val
  MOD_RES (10)...(10): Xaa = Pro, Ala or Ser
  MOD_RES (12)...(12): Xaa = Val, Thr, Ser, Arg, Gln, Pro, Asn, Met, Leu, Lys, Ile, His, Gly, Glu, Asp or Ala
  MOD_RES (13)...(13): Xaa = Ser, Pro, Glu, Leu, Gln or Val
  MOD_RES (14)...(14): Xaa = Gly, Asp, Asn or Ser
  MOD_RES (15)...(15): Xaa = Ser, Arg, Gln, Asn, Leu, Lys, Ile, His, Ala or Gly
  MOD_RES (17)...(17): Xaa = Val, Gln, Leu, Lys, Ile or Glu
  MOD_RES (19)...(19): Xaa = Thr, Ser, Leu or Ile
  MOD_RES (20)...(20): Xaa = Val, Gln, Pro, Leu, Glu or Ala
  MOD_RES (22)...(22): Xaa = Ser or Gly
  MOD_RES (23)...(23): Xaa = Thr or Phe
  MOD_RES (24)...(24): Xaa = Ser, Arg, Gln, Lys or His
  MOD_RES (26)...(26): Xaa = Val, Ser, Arg, Gln, Asn, Met, Leu, Lys, Ile, His, Gly, Glu or Asp
  MOD_RES (28)...(28): Xaa = Val, Pro, Leu, Ala, His, Asn, Arg, Ser or Thr
  MOD_RES (29)...(29): Xaa = Gln, Pro, Glu, Ala, Lys or Thr
  MOD_RES (31)...(31): Xaa = Tyr or Phe
  MOD_RES (32)...(32): Xaa = Thr, Ser, Ala, Glu, Lys, Leu, Met, Pro, Gln or Val
  MOD_RES (33)...(33): Xaa = Gly, Leu, Pro, Gln or Arg
  MOD_RES (34)...(34): Xaa = Val, Thr, Gln, Pro, Leu, Lys, Ile, Glu, Ala, Asp, Gly, Asn or Ser
  MOD_RES (35)...(35): Xaa = Ser, Arg, Asn, Leu, Ile, His, Ala, Glu, Gly, Pro or Gln
XXXXXCXXXXCXXXXCXXXXXXXXCXCXXXXXXXXC

SEQ ID NO: 369 - protein, 37 aa, Artificial Sequence
  human calcium binding epidermal growth factor (CaEGF) domain
  MOD_RES (1)...(1): Xaa = Val, Thr, Ile, Lys, Glu or Ala
  MOD_RES (3)...(3): Xaa = Val or Ile
  MOD_RES (7)...(7): Xaa = Val, Ser, Leu, Ala, Asp, Glu, Gly, Lys, Asn, Arg or Thr
  MOD_RES (8)...(8): Xaa = Ser, Pro, Glu, Leu, Gln or Val
  MOD_RES (9)...(9): Xaa = Ser, Gly, Asn, Asp, Ile or Val
  MOD_RES (10)...(10): Xaa = Pro, Ala or Ser
  MOD_RES (12)...(12): Xaa = Val, Thr, Ser, Arg, Gln, Pro, Asn, Met, Leu, Lys, Ile, His, Gly, Glu, Asp or Ala
  MOD_RES (13)...(13): Xaa = Ser, Pro, Glu, Leu, Gln or Val
  MOD_RES (14)...(14): Xaa = Gly, Asp, Asn or Ser
  MOD_RES (15)...(15): Xaa = Ser, Arg, Gln, Asn, Leu, Lys, Ile, His, Ala or Gly
  MOD_RES (17)...(17): Xaa = Val, Gln, Leu, Lys, Ile or Glu
  MOD_RES (19)...(19): Xaa = Thr, Ser, Leu or Ile
  MOD_RES (20)...(20): Xaa = Val, Gln, Pro, Leu, Glu or Ala
  MOD_RES (22)...(22): Xaa = Ser or Gly
  MOD_RES (23)...(23): Xaa = Thr or Phe
  MOD_RES (24)...(24): Xaa = Ser, Arg, Gln, Lys or His
  MOD_RES (26)...(26): Xaa = Val, Ser, Arg, Gln, Asn, Met, Leu, Lys, Ile, His, Gly, Glu or Asp
  MOD_RES (28)...(28): Xaa = Val, Pro, Leu, Ala, His, Asn, Arg, Ser or Thr
  MOD_RES (29)...(29): Xaa = Gln, Pro, Glu, Ala, Lys or Thr
  MOD_RES (31)...(31): Xaa = Tyr or Phe
  MOD_RES (32)...(32): Xaa = Thr, Ser, Ala, Glu, Lys, Leu, Met, Pro, Gln or Val
  MOD_RES (33)...(33): Xaa = Gly, Leu, Pro, Gln or Arg
  MOD_RES (34)...(34): Xaa = Val, Thr, Gln, Pro, Leu, Lys, Ile, Glu, Ala, Asp, Gly, Asn or Ser
  MOD_RES (35)...(35): Xaa = Ser, Arg, Asn, Leu, Ile, His, Ala, Glu, Gly, Pro or Gln
  MOD_RES (36)...(36): Xaa = Ala, Asp, Asn or Thr
XXXXXCXXXXCXXXXCXXXXXXXXCXCXXXXXXXXXC

SEQ ID NO: 370 - protein, 38 aa, Artificial Sequence
  human calcium binding epidermal growth factor (CaEGF) domain
  MOD_RES (1)...(1): Xaa = Val, Thr, Ile, Lys, Glu or Ala
  MOD_RES (3)...(3): Xaa = Val or Ile
  MOD_RES (7)...(7): Xaa = Val, Ser, Leu, Ala, Asp, Glu, Gly, Lys, Asn, Arg or Thr
  MOD_RES (8)...(8): Xaa = Ser, Pro, Glu, Leu, Gln or Val
  MOD_RES (9)...(9): Xaa = Ser, Gly, Asn, Asp, Ile or Val
  MOD_RES (10)...(10): Xaa = Pro, Ala or Ser
  MOD_RES (12)...(12): Xaa = Val, Thr, Ser, Arg, Gln, Pro, Asn, Met, Leu, Lys, Ile, His, Gly, Glu, Asp or Ala
  MOD_RES (13)...(13): Xaa = Ser, Pro, Glu, Leu, Gln or Val
  MOD_RES (14)...(14): Xaa = Gly, Asp, Asn or Ser
  MOD_RES (15)...(15): Xaa = Ser, Arg, Gln, Asn, Leu, Lys, Ile, His, Ala or Gly
  MOD_RES (17)...(17): Xaa = Val, Gln, Leu, Lys, Ile or Glu
  MOD_RES (19)...(19): Xaa = Thr, Ser, Leu or Ile
  MOD_RES (20)...(20): Xaa = Val, Gln, Pro, Leu, Glu or Ala
  MOD_RES (22)...(22): Xaa = Ser or Gly
  MOD_RES (23)...(23): Xaa = Thr or Phe
  MOD_RES (24)...(24): Xaa = Ser, Arg, Gln, Lys or His
  MOD_RES (26)...(26): Xaa = Val, Ser, Arg, Gln, Asn, Met, Leu, Lys, Ile, His, Gly, Glu or Asp
  MOD_RES (28)...(28): Xaa = Val, Pro, Leu, Ala, His, Asn, Arg, Ser or Thr
  MOD_RES (29)...(29): Xaa = Gln, Pro, Glu, Ala, Lys or Thr
  MOD_RES (31)...(31): Xaa = Tyr or Phe
  MOD_RES (32)...(32): Xaa = Thr, Ser, Ala, Glu, Lys, Leu, Met, Pro, Gln or Val
  MOD_RES (33)...(33): Xaa = Gly, Leu, Pro, Gln or Arg
  MOD_RES (34)...(34): Xaa = Val, Thr, Gln, Pro, Leu, Lys, Ile, Glu, Ala, Asp, Gly, Asn or Ser
  MOD_RES (35)...(35): Xaa = Ser, Arg, Asn, Leu, Ile, His, Ala, Glu, Gly, Pro or Gln
  MOD_RES (36)...(36): Xaa = Ala, Asp, Asn or Thr
  MOD_RES (37)...(37): Xaa = Gly, Arg or Ser
XXXXXCXXXXCXXXXCXXXXXXXXCXCXXXXXXXXXXC

SEQ ID NO: 371 - protein, 39 aa, Artificial Sequence
  human calcium binding epidermal growth factor (CaEGF) domain
  MOD_RES (1)...(1): Xaa = Val, Thr, Ile, Lys, Glu or Ala
  MOD_RES (3)...(3): Xaa = Val or Ile
  MOD_RES (7)...(7): Xaa = Val, Ser, Leu, Ala, Asp, Glu, Gly, Lys, Asn, Arg or Thr
  MOD_RES (8)...(8): Xaa = Ser, Pro, Glu, Leu, Gln or Val
  MOD_RES (9)...(9): Xaa = Ser, Gly, Asn, Asp, Ile or Val
  MOD_RES (10)...(10): Xaa = Pro, Ala or Ser
  MOD_RES (12)...(12): Xaa = Val, Thr, Ser, Arg, Gln, Pro, Asn, Met, Leu, Lys, Ile, His, Gly, Glu, Asp or Ala
  MOD_RES (13)...(13): Xaa = Ser, Pro, Glu, Leu, Gln or Val
  MOD_RES (14)...(14): Xaa = Gly, Asp, Asn or Ser
  MOD_RES (15)...(15): Xaa = Ser, Arg, Gln, Asn, Leu, Lys, Ile, His, Ala or Gly
  MOD_RES (17)...(17): Xaa = Val, Gln, Leu, Lys, Ile or Glu
  MOD_RES (19)...(19): Xaa = Thr, Ser, Leu or Ile
  MOD_RES (20)...(20): Xaa = Val, Gln, Pro, Leu, Glu or Ala
  MOD_RES (22)...(22): Xaa = Ser or Gly
  MOD_RES (23)...(23): Xaa = Thr or Phe
  MOD_RES (24)...(24): Xaa = Ser, Arg, Gln, Lys or His
  MOD_RES (26)...(26): Xaa = Val, Ser, Arg, Gln, Asn, Met, Leu, Lys, Ile, His, Gly, Glu or Asp
  MOD_RES (28)...(28): Xaa = Val, Pro, Leu, Ala, His, Asn, Arg, Ser or Thr
  MOD_RES (29)...(29): Xaa = Gln, Pro, Glu, Ala, Lys or Thr
  MOD_RES (31)...(31): Xaa = Tyr or Phe
  MOD_RES (32)...(32): Xaa = Thr, Ser, Ala, Glu, Lys, Leu, Met, Pro, Gln or Val
  MOD_RES (33)...(33): Xaa = Gly, Leu, Pro, Gln or Arg
  MOD_RES (34)...(34): Xaa = Val, Thr, Gln, Pro, Leu, Lys, Ile, Glu, Ala, Asp, Gly, Asn or Ser
  MOD_RES (35)...(35): Xaa = Ser, Arg, Asn, Leu, Ile, His, Ala, Glu, Gly, Pro or Gln
  MOD_RES (36)...(36): Xaa = Ala, Asp, Asn or Thr
  MOD_RES (37)...(37): Xaa = Gly, Arg or Ser
  MOD_RES (38)...(38): Xaa = Lys, Asn, Arg, Ser or Thr
XXXXXCXXXXCXXXXCXXXXXXXXCXCXXXXXXXXXXXC

SEQ ID NO: 372 - protein, 40 aa, Artificial Sequence
  human calcium binding epidermal growth factor (CaEGF) domain
  MOD_RES (1)...(1): Xaa = Val, Thr, Ile, Lys, Glu or Ala
  MOD_RES (3)...(3): Xaa = Val or Ile
  MOD_RES (7)...(7): Xaa = Val, Ser, Leu, Ala, Asp, Glu, Gly, Lys, Asn, Arg or Thr
  MOD_RES (8)...(8): Xaa = Ser, Pro, Glu, Leu, Gln or Val
  MOD_RES (9)...(9): Xaa = Ser, Gly, Asn, Asp, Ile or Val
  MOD_RES (10)...(10): Xaa = Pro, Ala or Ser
  MOD_RES (12)...(12): Xaa = Val, Thr, Ser, Arg, Gln, Pro, Asn, Met, Leu, Lys, Ile, His, Gly, Glu, Asp or Ala
  MOD_RES (13)...(13): Xaa = Ser, Pro, Glu, Leu, Gln or Val
  MOD_RES (14)...(14): Xaa = Gly, Asp, Asn or Ser
  MOD_RES (15)...(15): Xaa = Ser, Arg, Gln, Asn, Leu, Lys, Ile, His, Ala or Gly
  MOD_RES (17)...(17): Xaa = Val, Gln, Leu, Lys, Ile or Glu
  MOD_RES (19)...(19): Xaa = Thr, Ser, Leu or Ile
  MOD_RES (20)...(20): Xaa = Val, Gln, Pro, Leu, Glu or Ala
  MOD_RES (22)...(22): Xaa = Ser or Gly
  MOD_RES (23)...(23): Xaa = Thr or Phe
  MOD_RES (24)...(24): Xaa = Ser, Arg, Gln, Lys or His
  MOD_RES (26)...(26): Xaa = Val, Ser, Arg, Gln, Asn, Met, Leu, Lys, Ile, His, Gly, Glu or Asp
  MOD_RES (28)...(28): Xaa = Val, Pro, Leu, Ala, His, Asn, Arg, Ser or Thr
  MOD_RES (29)...(29): Xaa = Gln, Pro, Glu, Ala, Lys or Thr
  MOD_RES (31)...(31): Xaa = Tyr or Phe
  MOD_RES (32)...(32): Xaa = Thr, Ser, Ala, Glu, Lys, Leu, Met, Pro, Gln or Val
  MOD_RES (33)...(33): Xaa = Gly, Leu, Pro, Gln or Arg
  MOD_RES (34)...(34): Xaa = Val, Thr, Gln, Pro, Leu, Lys, Ile, Glu, Ala, Asp, Gly, Asn or Ser
  MOD_RES (35)...(35): Xaa = Ser, Arg, Asn, Leu, Ile, His, Ala, Glu, Gly, Pro or Gln
  MOD_RES (36)...(36): Xaa = Ala, Asp, Asn or Thr
  MOD_RES (37)...(37): Xaa = Gly, Arg or Ser
  MOD_RES (38)...(38): Xaa = Lys, Asn, Arg, Ser or Thr
  MOD_RES (39)...(39): Xaa = Ala, Asp, Glu, Gly, Lys, Asn, Arg, Ser or Thr
XXXXXCXXXXCXXXXCXXXXXXXXCXCXXXXXXXXXXXXC

SEQ ID NO: 373 - protein, 37 aa, Artificial Sequence
  human calcium binding epidermal growth factor (CaEGF) domain
  MOD_RES (1)...(1): Xaa = Val, Thr, Ile, Lys, Glu or Ala
  MOD_RES (3)...(3): Xaa = Val or Ile
  MOD_RES (7)...(7): Xaa = Val, Ser, Leu, Ala, Asp, Glu, Gly, Lys, Asn, Arg or Thr
  MOD_RES (8)...(8): Xaa = Ser, Pro, Glu, Leu, Gln or Val
  MOD_RES (9)...(9): Xaa = Ser, Gly, Asn, Asp, Ile or Val
  MOD_RES (10)...(10): Xaa = Pro, Ala or Ser
  MOD_RES (11)...(11): Xaa = Asp, Gly, His, Asn, Arg or Ser
  MOD_RES (13)...(13): Xaa = Val, Thr, Ser, Arg, Gln, Pro, Asn, Met, Leu, Lys, Ile, His, Gly, Glu, Asp or Ala
  MOD_RES (14)...(14): Xaa = Ser, Arg, Asn or His
  MOD_RES (15)...(15): Xaa = Gly, Asp, Asn or Ser
  MOD_RES (16)...(16): Xaa = Ser, Arg, Gln, Asn, Leu, Lys, Ile, His, Ala or Gly
  MOD_RES (18)...(18): Xaa = Val, Gln, Leu, Lys, Ile or Glu
  MOD_RES (20)...(20): Xaa = Thr, Ser, Leu or Ile
  MOD_RES (21)...(21): Xaa = Val, Gln, Pro, Leu, Glu or Ala
  MOD_RES (23)...(23): Xaa = Ser or Gly
  MOD_RES (24)...(24): Xaa = Thr or Phe
  MOD_RES (25)...(25): Xaa = Ser, Arg, Gln, Lys or His
  MOD_RES (27)...(27): Xaa = Val, Ser, Arg, Gln, Asn, Met, Leu, Lys, Ile, His, Gly, Glu or Asp
  MOD_RES (29)...(29): Xaa = Val, Pro, Leu, Ala, His, Asn, Arg, Ser or Thr
  MOD_RES (30)...(30): Xaa = Gln, Pro, Glu, Ala, Lys or Thr
  MOD_RES (32)...(32): Xaa = Tyr or Phe
  MOD_RES (33)...(33): Xaa = Thr, Ser, Ala, Glu, Lys, Leu, Met, Pro, Gln or Val
  MOD_RES (34)...(34): Xaa = Gly, Leu, Pro, Gln or Arg
  MOD_RES (35)...(35): Xaa = Val, Thr, Gln, Pro, Leu, Lys, Ile, Glu, Ala, Asp, Gly, Asn or Ser
  MOD_RES (36)...(36): Xaa = Ser, Arg, Asn, Leu, Ile, His, Ala, Glu, Gly, Pro or Gln
XXXXXCXXXXXCXXXXCXXXXXXXXCXCXXXXXXXXC

SEQ ID NO: 374 - protein, 38 aa, Artificial Sequence
  human calcium binding epidermal growth factor (CaEGF) domain
  MOD_RES (1)...(1): Xaa = Val, Thr, Ile, Lys, Glu or Ala
  MOD_RES (3)...(3): Xaa = Val or Ile
  MOD_RES (7)...(7): Xaa = Val, Ser, Leu, Ala, Asp, Glu, Gly, Lys, Asn, Arg or Thr
  MOD_RES (8)...(8): Xaa = Ser, Pro, Glu, Leu, Gln or Val
  MOD_RES (9)...(9): Xaa = Ser, Gly, Asn, Asp, Ile or Val
  MOD_RES (10)...(10): Xaa = Pro, Ala or Ser
  MOD_RES (11)...(11): Xaa = Asp, Gly, His, Asn, Arg or Ser
  MOD_RES (13)...(13): Xaa = Val, Thr, Ser, Arg, Gln, Pro, Asn, Met, Leu, Lys, Ile, His, Gly, Glu, Asp or Ala
  MOD_RES (14)...(14): Xaa = Ser, Arg, Asn or His
  MOD_RES (15)...(15): Xaa = Gly, Asp, Asn or Ser
  MOD_RES (16)...(16): Xaa = Ser, Arg, Gln, Asn, Leu, Lys, Ile, His, Ala or Gly
  MOD_RES (18)...(18): Xaa = Val, Gln, Leu, Lys, Ile or Glu
  MOD_RES (20)...(20): Xaa = Thr, Ser, Leu or Ile
  MOD_RES (21)...(21): Xaa = Val, Gln, Pro, Leu, Glu or Ala
  MOD_RES (23)...(23): Xaa = Ser or Gly
  MOD_RES (24)...(24): Xaa = Thr or Phe
  MOD_RES (25)...(25): Xaa = Ser, Arg, Gln, Lys or His
  MOD_RES (27)...(27): Xaa = Val, Ser, Arg, Gln, Asn, Met, Leu, Lys, Ile, His, Gly, Glu or Asp
  MOD_RES (29)...(29): Xaa = Val, Pro, Leu, Ala, His, Asn, Arg, Ser or Thr
  MOD_RES (30)...(30): Xaa = Gln, Pro, Glu, Ala, Lys or Thr
  MOD_RES (32)...(32): Xaa = Tyr or Phe
  MOD_RES (33)...(33): Xaa = Thr, Ser, Ala, Glu, Lys, Leu, Met, Pro, Gln or Val
  MOD_RES (34)...(34): Xaa = Gly, Leu, Pro, Gln or Arg
  MOD_RES (35)...(35): Xaa = Val, Thr, Gln, Pro, Leu, Lys, Ile, Glu, Ala, Asp, Gly, Asn or Ser
  MOD_RES (36)...(36): Xaa = Ser, Arg, Asn, Leu, Ile, His, Ala, Glu, Gly, Pro or Gln
  MOD_RES (37)...(37): Xaa = Ala, Asp, Asn or Thr
XXXXXCXXXXXCXXXXCXXXXXXXXCXCXXXXXXXXXC

SEQ ID NO: 375 - protein, 39 aa, Artificial Sequence
  human calcium binding epidermal growth factor (CaEGF) domain
  MOD_RES (1)...(1): Xaa = Val, Thr, Ile, Lys, Glu or Ala
  MOD_RES (3)...(3): Xaa = Val or Ile
  MOD_RES (7)...(7): Xaa = Val, Ser, Leu, Ala, Asp, Glu, Gly, Lys, Asn, Arg or Thr
  MOD_RES (8)...(8): Xaa = Ser, Pro, Glu, Leu, Gln or Val
  MOD_RES (9)...(9): Xaa = Ser, Gly, Asn, Asp, Ile or Val
  MOD_RES (10)...(10): Xaa = Pro, Ala or Ser
  MOD_RES (11)...(11): Xaa = Asp, Gly, His, Asn, Arg or Ser
  MOD_RES (13)...(13): Xaa = Val, Thr, Ser, Arg, Gln, Pro, Asn, Met, Leu, Lys, Ile, His, Gly, Glu, Asp or Ala
  MOD_RES (14)...(14): Xaa = Ser, Arg, Asn or His
  MOD_RES (15)...(15): Xaa = Gly, Asp, Asn or Ser
  MOD_RES (16)...(16): Xaa = Ser, Arg, Gln, Asn, Leu, Lys, Ile, His, Ala or Gly
  MOD_RES (18)...(18): Xaa = Val, Gln, Leu, Lys, Ile or Glu
  MOD_RES (20)...(20): Xaa = Thr, Ser, Leu or Ile
  MOD_RES (21)...(21): Xaa = Val, Gln, Pro, Leu, Glu or Ala
  MOD_RES (23)...(23): Xaa = Ser or Gly
  MOD_RES (24)...(24): Xaa = Thr or Phe
  MOD_RES (25)...(25): Xaa = Ser, Arg, Gln, Lys or His
  MOD_RES (27)...(27): Xaa = Val, Ser, Arg, Gln, Asn, Met, Leu, Lys, Ile, His, Gly, Glu or Asp
  MOD_RES (29)...(29): Xaa = Val, Pro, Leu, Ala, His, Asn, Arg, Ser or Thr
  MOD_RES (30)...(30): Xaa = Gln, Pro, Glu, Ala, Lys or Thr
  MOD_RES (32)...(32): Xaa = Tyr or Phe
  MOD_RES (33)...(33): Xaa = Thr, Ser, Ala, Glu, Lys, Leu, Met, Pro, Gln or Val
  MOD_RES (34)...(34): Xaa = Gly, Leu, Pro, Gln or Arg
  MOD_RES (35)...(35): Xaa = Val, Thr, Gln, Pro, Leu, Lys, Ile, Glu, Ala, Asp, Gly, Asn or Ser
  MOD_RES (36)...(36): Xaa = Ser, Arg, Asn, Leu, Ile, His, Ala, Glu, Gly, Pro or Gln
  MOD_RES (37)...(37): Xaa = Ala, Asp, Asn or Thr
  MOD_RES (38)...(38): Xaa = Gly, Arg or Ser
XXXXXCXXXXXCXXXXCXXXXXXXXCXCXXXXXXXXXXC

SEQ ID NO: 376 - protein, 40 aa, Artificial Sequence
  human calcium binding epidermal growth factor (CaEGF) domain
  MOD_RES (1)...(1): Xaa = Val, Thr, Ile, Lys, Glu or Ala
  MOD_RES (3)...(3): Xaa = Val or Ile
  MOD_RES (7)...(7): Xaa = Val, Ser, Leu, Ala, Asp, Glu, Gly, Lys, Asn, Arg or Thr
  MOD_RES (8)...(8): Xaa = Ser, Pro, Glu, Leu, Gln or Val
  MOD_RES (9)...(9): Xaa = Ser, Gly, Asn, Asp, Ile or Val
  MOD_RES (10)...(10): Xaa = Pro, Ala or Ser
  MOD_RES (11)...(11): Xaa = Asp, Gly, His, Asn, Arg or Ser
  MOD_RES (13)...(13): Xaa = Val, Thr, Ser, Arg, Gln, Pro, Asn, Met, Leu, Lys, Ile, His, Gly, Glu, Asp or Ala
  MOD_RES (14)...(14): Xaa = Ser, Arg, Asn or His
  MOD_RES (15)...(15): Xaa = Gly, Asp, Asn or Ser
  MOD_RES (16)...(16): Xaa = Ser, Arg, Gln, Asn, Leu, Lys, Ile, His, Ala or Gly
  MOD_RES (18)...(18): Xaa = Val, Gln, Leu, Lys, Ile or Glu
  MOD_RES (20)...(20): Xaa = Thr, Ser, Leu or Ile
  MOD_RES (21)...(21): Xaa = Val, Gln, Pro, Leu, Glu or Ala
  MOD_RES (23)...(23): Xaa = Ser or Gly
  MOD_RES (24)...(24): Xaa = Thr or Phe
  MOD_RES (25)...(25): Xaa = Ser, Arg, Gln, Lys or His
  MOD_RES (27)...(27): Xaa = Val, Ser, Arg, Gln, Asn, Met, Leu, Lys, Ile, His, Gly, Glu or Asp
  MOD_RES (29)...(29): Xaa = Val, Pro, Leu, Ala, His, Asn, Arg, Ser or Thr
  MOD_RES (30)...(30): Xaa = Gln, Pro, Glu, Ala, Lys or Thr
  MOD_RES (32)...(32): Xaa = Tyr or Phe
  MOD_RES (33)...(33): Xaa = Thr, Ser, Ala, Glu, Lys, Leu, Met, Pro, Gln or Val
  MOD_RES (34)...(34): Xaa = Gly, Leu, Pro, Gln or Arg
  MOD_RES (35)...(35): Xaa = Val, Thr, Gln, Pro, Leu, Lys, Ile, Glu, Ala, Asp, Gly, Asn or Ser
  MOD_RES (36)...(36): Xaa = Ser, Arg, Asn, Leu, Ile, His, Ala, Glu, Gly, Pro or Gln
  MOD_RES (37)...(37): Xaa = Ala, Asp, Asn or Thr
  MOD_RES (38)...(38): Xaa = Gly, Arg or Ser
  MOD_RES (39)...(39): Xaa = Lys, Asn, Arg, Ser or Thr
XXXXXCXXXXXCXXXXCXXXXXXXXCXCXXXXXXXXXXXC

SEQ ID NO: 377 - protein, 41 aa, Artificial Sequence
  human calcium binding epidermal growth factor (CaEGF) domain
  MOD_RES (1)...(1): Xaa = Val, Thr, Ile, Lys, Glu or Ala
  MOD_RES (3)...(3): Xaa = Val or Ile
  MOD_RES (7)...(7): Xaa = Val, Ser, Leu, Ala, Asp, Glu, Gly, Lys, Asn, Arg or Thr
  MOD_RES (8)...(8): Xaa = Ser, Pro, Glu, Leu, Gln or Val
  MOD_RES (9)...(9): Xaa = Ser, Gly, Asn, Asp, Ile or Val
  MOD_RES (10)...(10): Xaa = Pro, Ala or Ser
  MOD_RES (11)...(11): Xaa = Asp, Gly, His, Asn, Arg or Ser
  MOD_RES (13)...(13): Xaa = Val, Thr, Ser, Arg, Gln, Pro, Asn, Met, Leu, Lys, Ile, His, Gly, Glu, Asp or Ala
  MOD_RES (14)...(14): Xaa = Ser, Arg, Asn or His
  MOD_RES (15)...(15): Xaa = Gly, Asp, Asn or Ser
  MOD_RES (16)...(16): Xaa = Ser, Arg, Gln, Asn, Leu, Lys, Ile, His, Ala or Gly
  MOD_RES (18)...(18): Xaa = Val, Gln, Leu, Lys, Ile or Glu
  MOD_RES (20)...(20): Xaa = Thr, Ser, Leu or Ile
  MOD_RES (21)...(21): Xaa = Val, Gln, Pro, Leu, Glu or Ala
  MOD_RES (23)...(23): Xaa = Ser or Gly
  MOD_RES (24)...(24): Xaa = Thr or Phe
  MOD_RES (25)...(25): Xaa = Ser, Arg, Gln, Lys or His
  MOD_RES (27)...(27): Xaa = Val, Ser, Arg, Gln, Asn, Met, Leu, Lys, Ile, His, Gly, Glu or Asp
  MOD_RES (29)...(29): Xaa = Val, Pro, Leu, Ala, His, Asn, Arg, Ser or Thr
  MOD_RES (30)...(30): Xaa = Gln, Pro, Glu, Ala, Lys or Thr
  MOD_RES (32)...(32): Xaa = Tyr or Phe
  MOD_RES (33)...(33): Xaa = Thr, Ser, Ala, Glu, Lys, Leu, Met, Pro, Gln or Val
  MOD_RES (34)...(34): Xaa = Gly, Leu, Pro, Gln or Arg
  MOD_RES (35)...(35): Xaa = Val, Thr, Gln, Pro, Leu, Lys, Ile, Glu, Ala, Asp, Gly, Asn or Ser
  MOD_RES (36)...(36): Xaa = Ser, Arg, Asn, Leu, Ile, His, Ala, Glu, Gly, Pro or Gln
  MOD_RES (37)...(37): Xaa = Ala, Asp, Asn or Thr
  MOD_RES (38)...(38): Xaa = Gly, Arg or Ser
  MOD_RES (39)...(39): Xaa = Lys, Asn, Arg, Ser or Thr
  MOD_RES (40)...(40): Xaa = Ala, Asp, Glu, Gly, Lys, Asn, Arg, Ser or Thr
XXXXXCXXXXXCXXXXCXXXXXXXXCXCXXXXXXXXXXXXC

SEQ ID NO: 378 - protein, 38 aa, Artificial Sequence
  human calcium binding epidermal growth factor (CaEGF) domain
  MOD_RES (1)...(1): Xaa = Val, Thr, Ile, Lys, Glu or Ala
  MOD_RES (3)...(3): Xaa = Val or Ile
  MOD_RES (7)...(7): Xaa = Val, Ser, Leu, Ala, Asp, Glu, Gly, Lys, Asn, Arg or Thr
  MOD_RES (8)...(8): Xaa = Ser, Pro, Glu, Leu, Gln or Val
  MOD_RES (9)...(9): Xaa = Ser, Gly, Asn, Asp, Ile or Val
  MOD_RES (10)...(10): Xaa = Pro, Ala or Ser
  MOD_RES (11)...(11): Xaa = Asp, Gly, His, Asn, Arg or Ser
  MOD_RES (12)...(12): Xaa = Ala, Ile, Leu, Pro, Thr or Val
  MOD_RES (14)...(14): Xaa = Val, Thr, Ser, Arg, Gln, Pro, Asn, Met, Leu, Lys, Ile, His, Gly, Glu, Asp or Ala
  MOD_RES (15)...(15): Xaa = Ser, Arg, Asn or His
  MOD_RES (16)...(16): Xaa = Gly, Asp, Asn or Ser
  MOD_RES (17)...(17): Xaa = Ser, Arg, Gln, Asn, Leu, Lys, Ile, His, Ala or Gly
  MOD_RES (19)...(19): Xaa = Val, Gln, Leu, Lys, Ile or Glu
  MOD_RES (21)...(21): Xaa = Thr, Ser, Leu or Ile
  MOD_RES (22)...(22): Xaa = Val, Gln, Pro, Leu, Glu or Ala
  MOD_RES (24)...(24): Xaa = Ser or Gly
  MOD_RES (25)...(25): Xaa = Thr or Phe
  MOD_RES (26)...(26): Xaa = Ser, Arg, Gln, Lys or His
  MOD_RES (28)...(28): Xaa = Val, Ser, Arg, Gln, Asn, Met, Leu, Lys, Ile, His, Gly, Glu or Asp
  MOD_RES (30)...(30): Xaa = Val, Pro, Leu, Ala, His, Asn, Arg, Ser or Thr
  MOD_RES (31)...(31): Xaa = Gln, Pro, Glu, Ala, Lys or Thr
  MOD_RES (33)...(33): Xaa = Tyr or Phe
  MOD_RES (34)...(34): Xaa = Thr, Ser, Ala, Glu, Lys, Leu, Met, Pro, Gln or Val
  MOD_RES (35)...(35): Xaa = Gly, Leu, Pro, Gln or Arg
  MOD_RES (36)...(36): Xaa = Val, Thr, Gln, Pro, Leu, Lys, Ile, Glu, Ala, Asp, Gly, Asn or Ser
  MOD_RES (37)...(37): Xaa = Ser, Arg, Asn, Leu, Ile, His, Ala, Glu, Gly, Pro or Gln
XXXXXCXXXXXXCXXXXCXXXXXXXXCXCXXXXXXXXC

SEQ ID NO: 379 - protein, 39 aa, Artificial Sequence
  human calcium binding epidermal growth factor (CaEGF) domain
  MOD_RES (1)...(1): Xaa = Val, Thr, Ile, Lys, Glu or Ala
  MOD_RES (3)...(3): Xaa = Val or Ile
  MOD_RES (7)...(7): Xaa = Val, Ser, Leu, Ala, Asp, Glu, Gly, Lys, Asn, Arg or Thr
  MOD_RES (8)...(8): Xaa = Ser, Pro, Glu, Leu, Gln or Val
  MOD_RES (9)...(9): Xaa = Ser, Gly, Asn, Asp, Ile or Val
  MOD_RES (10)...(10): Xaa = Pro, Ala or Ser
  MOD_RES (11)...(11): Xaa = Asp, Gly, His, Asn, Arg or Ser
  MOD_RES (12)...(12): Xaa = Ala, Ile, Leu, Pro, Thr or Val
  MOD_RES (14)...(14): Xaa = Val, Thr, Ser, Arg, Gln, Pro, Asn, Met, Leu, Lys, Ile, His, Gly, Glu, Asp or Ala
  MOD_RES (15)...(15): Xaa = Ser, Arg, Asn or His
  MOD_RES (16)...(16): Xaa = Gly, Asp, Asn or Ser
  MOD_RES (17)...(17): Xaa = Ser, Arg, Gln, Asn, Leu, Lys, Ile, His, Ala or Gly
  MOD_RES (19)...(19): Xaa = Val, Gln, Leu, Lys, Ile or Glu
  MOD_RES (21)...(21): Xaa = Thr, Ser, Leu or Ile
  MOD_RES (22)...(22): Xaa = Val, Gln, Pro, Leu, Glu or Ala
  MOD_RES (24)...(24): Xaa = Ser or Gly
  MOD_RES (25)...(25): Xaa = Thr or Phe
  MOD_RES (26)...(26): Xaa = Ser, Arg, Gln, Lys or His
  MOD_RES (28)...(28): Xaa = Val, Ser, Arg, Gln, Asn, Met, Leu, Lys, Ile, His, Gly, Glu or Asp
  MOD_RES (30)...(30): Xaa = Val, Pro, Leu, Ala, His, Asn, Arg, Ser or Thr
  MOD_RES (31)...(31): Xaa = Gln, Pro, Glu, Ala, Lys or Thr
  MOD_RES (33)...(33): Xaa = Tyr or Phe
  MOD_RES (34)...(34): Xaa = Thr, Ser, Ala, Glu, Lys, Leu, Met, Pro, Gln or Val
  MOD_RES (35)...(35): Xaa = Gly, Leu, Pro, Gln or Arg
  MOD_RES (36)...(36): Xaa = Val, Thr, Gln, Pro, Leu, Lys, Ile, Glu, Ala, Asp, Gly, Asn or Ser
  MOD_RES (37)...(37): Xaa = Ser, Arg, Asn, Leu, Ile, His, Ala, Glu, Gly, Pro or Gln
  MOD_RES (38)...(38): Xaa = Ala, Asp, Asn or Thr
XXXXXCXXXXXXCXXXXCXXXXXXXXCXCXXXXXXXXXC

SEQ ID NO: 380 - protein, 40 aa, Artificial Sequence
  human calcium binding epidermal growth factor (CaEGF) domain
  MOD_RES (1)...(1): Xaa = Val, Thr, Ile, Lys, Glu or Ala
  MOD_RES (3)...(3): Xaa = Val or Ile
  MOD_RES (7)...(7): Xaa = Val, Ser, Leu, Ala, Asp, Glu, Gly, Lys, Asn, Arg or Thr
  MOD_RES (8)...(8): Xaa = Ser, Pro, Glu, Leu, Gln or Val
  MOD_RES (9)...(9): Xaa = Ser, Gly, Asn, Asp, Ile or Val
  MOD_RES (10)...(10): Xaa = Pro, Ala or Ser
  MOD_RES (11)...(11): Xaa = Asp, Gly, His, Asn, Arg or Ser
  MOD_RES (12)...(12): Xaa = Ala, Ile, Leu, Pro, Thr or Val
  MOD_RES (14)...(14): Xaa = Val, Thr, Ser, Arg, Gln, Pro, Asn, Met, Leu, Lys, Ile, His, Gly, Glu, Asp or Ala
  MOD_RES (15)...(15): Xaa = Ser, Arg, Asn or His
  MOD_RES (16)...(16): Xaa = Gly, Asp, Asn or Ser
  MOD_RES (17)...(17): Xaa = Ser, Arg, Gln, Asn, Leu, Lys, Ile, His, Ala or Gly
  MOD_RES (19)...(19): Xaa = Val, Gln, Leu, Lys, Ile or Glu
  MOD_RES (21)...(21): Xaa = Thr, Ser, Leu or Ile
  MOD_RES (22)...(22): Xaa = Val, Gln, Pro, Leu, Glu or Ala
  MOD_RES (24)...(24): Xaa = Ser or Gly
  MOD_RES (25)...(25): Xaa = Thr or Phe
  MOD_RES (26)...(26): Xaa = Ser, Arg, Gln, Lys or His
  MOD_RES (28)...(28): Xaa = Val, Ser, Arg, Gln, Asn, Met, Leu, Lys, Ile, His, Gly, Glu or Asp
  MOD_RES (30)...(30): Xaa = Val, Pro, Leu, Ala, His, Asn, Arg, Ser or Thr
  MOD_RES (31)...(31): Xaa = Gln, Pro, Glu, Ala, Lys or Thr
  MOD_RES (33)...(33): Xaa = Tyr or Phe
  MOD_RES (34)...(34): Xaa = Thr, Ser, Ala, Glu, Lys, Leu, Met, Pro, Gln or Val
  MOD_RES (35)...(35): Xaa = Gly, Leu, Pro, Gln or Arg
  MOD_RES (36)...(36): Xaa = Val, Thr, Gln, Pro, Leu, Lys, Ile, Glu, Ala, Asp, Gly, Asn or Ser
  MOD_RES (37)...(37): Xaa = Ser, Arg, Asn, Leu, Ile, His, Ala, Glu, Gly, Pro or Gln
  MOD_RES (38)...(38): Xaa = Ala, Asp, Asn or Thr
  MOD_RES (39)...(39): Xaa = Gly, Arg or Ser
XXXXXCXXXXXXCXXXXCXXXXXXXXCXCXXXXXXXXXXC

SEQ ID NO: 381 - protein, 41 aa, Artificial Sequence
  human calcium binding epidermal growth factor (CaEGF) domain
  MOD_RES (1)...(1): Xaa = Val, Thr, Ile, Lys, Glu or Ala
  MOD_RES (3)...(3): Xaa = Val or Ile
  MOD_RES (7)...(7): Xaa = Val, Ser, Leu, Ala, Asp, Glu, Gly, Lys, Asn, Arg or Thr
  MOD_RES (8)...(8): Xaa = Ser, Pro, Glu, Leu, Gln or Val
  MOD_RES (9)...(9): Xaa = Ser, Gly, Asn, Asp, Ile or Val
  MOD_RES (10)...(10): Xaa = Pro, Ala or Ser
  MOD_RES (11)...(11): Xaa = Asp, Gly, His, Asn, Arg or Ser
  MOD_RES (12)...(12): Xaa = Ala, Ile, Leu, Pro, Thr or Val
  MOD_RES (14)...(14): Xaa = Val, Thr, Ser, Arg, Gln, Pro, Asn, Met, Leu, Lys, Ile, His, Gly, Glu, Asp or Ala
  MOD_RES (15)...(15): Xaa = Ser, Arg, Asn or His
  MOD_RES (16)...(16): Xaa = Gly, Asp, Asn or Ser
  MOD_RES (17)...(17): Xaa = Ser, Arg, Gln, Asn, Leu, Lys, Ile, His, Ala or Gly
  MOD_RES (19)...(19): Xaa = Val, Gln, Leu, Lys, Ile or Glu
  MOD_RES (21)...(21): Xaa = Thr, Ser, Leu or Ile
  MOD_RES (22)...(22): Xaa = Val, Gln, Pro, Leu, Glu or Ala
  MOD_RES (24)...(24): Xaa = Ser or Gly
  MOD_RES (25)...(25): Xaa = Thr or Phe
  MOD_RES (26)...(26): Xaa = Ser, Arg, Gln, Lys or His
  MOD_RES (28)...(28): Xaa = Val, Ser, Arg, Gln, Asn, Met, Leu, Lys, Ile, His, Gly, Glu or Asp
  MOD_RES (30)...(30): Xaa = Val, Pro, Leu, Ala, His, Asn, Arg, Ser or Thr
  MOD_RES (31)...(31): Xaa = Gln, Pro, Glu, Ala, Lys or Thr
  MOD_RES (33)...(33): Xaa = Tyr or Phe
  MOD_RES (34)...(34): Xaa = Thr, Ser, Ala, Glu, Lys, Leu, Met, Pro, Gln or Val
  MOD_RES (35)...(35): Xaa = Gly, Leu, Pro, Gln or Arg
  MOD_RES (36)...(36): Xaa = Val, Thr, Gln, Pro, Leu, Lys, Ile, Glu, Ala, Asp, Gly, Asn or Ser
  MOD_RES (37)...(37): Xaa = Ser, Arg, Asn, Leu, Ile, His, Ala, Glu, Gly, Pro or Gln
  MOD_RES (38)...(38): Xaa = Ala, Asp, Asn or Thr
  MOD_RES (39)...(39): Xaa = Gly, Arg or Ser
  MOD_RES (40)...(40): Xaa = Lys, Asn, Arg, Ser or Thr
XXXXXCXXXXXXCXXXXCXXXXXXXXCXCXXXXXXXXXXXC

SEQ ID NO: 382 - protein, 42 aa, Artificial Sequence
  human calcium binding epidermal growth factor (CaEGF) domain
  MOD_RES (1)...(1): Xaa = Val, Thr, Ile, Lys, Glu or Ala
  MOD_RES (3)...(3): Xaa = Val or Ile
  MOD_RES (7)...(7): Xaa = Val, Ser, Leu, Ala, Asp, Glu, Gly, Lys, Asn, Arg or Thr
  MOD_RES (8)...(8): Xaa = Ser, Pro, Glu, Leu, Gln or Val
  MOD_RES (9)...(9): Xaa = Ser, Gly, Asn, Asp, Ile or Val
  MOD_RES (10)...(10): Xaa = Pro, Ala or Ser
  MOD_RES (11)...(11): Xaa = Asp, Gly, His, Asn, Arg or Ser
  MOD_RES (12)...(12): Xaa = Ala, Ile, Leu, Pro, Thr or Val
  MOD_RES (14)...(14): Xaa = Val, Thr, Ser, Arg, Gln, Pro, Asn, Met, Leu, Lys, Ile, His, Gly, Glu, Asp or Ala
  MOD_RES (15)...(15): Xaa = Ser, Arg, Asn or His
  MOD_RES (16)...(16): Xaa = Gly, Asp, Asn or Ser
  MOD_RES (17)...(17): Xaa = Ser, Arg, Gln, Asn, Leu, Lys, Ile, His, Ala or Gly
  MOD_RES (19)...(19): Xaa = Val, Gln, Leu, Lys, Ile or Glu
  MOD_RES (21)...(21): Xaa = Thr, Ser, Leu or Ile
  MOD_RES (22)...(22): Xaa = Val, Gln, Pro, Leu, Glu or Ala
  MOD_RES (24)...(24): Xaa = Ser or Gly
  MOD_RES (25)...(25): Xaa = Thr or Phe
  MOD_RES (26)...(26): Xaa = Ser, Arg, Gln, Lys or His
  MOD_RES (28)...(28): Xaa = Val, Ser, Arg, Gln, Asn, Met, Leu, Lys, Ile, His, Gly, Glu or Asp
  MOD_RES (30)...(30): Xaa = Val, Pro, Leu, Ala, His, Asn, Arg, Ser or Thr
  MOD_RES (31)...(31): Xaa = Gln, Pro, Glu, Ala, Lys or Thr
  MOD_RES (33)...(33): Xaa = Tyr or Phe
  MOD_RES (34)...(34): Xaa = Thr, Ser, Ala, Glu, Lys, Leu, Met, Pro, Gln or Val
  MOD_RES (35)...(35): Xaa = Gly, Leu, Pro, Gln or Arg
  MOD_RES (36)...(36): Xaa = Val, Thr, Gln, Pro, Leu, Lys, Ile, Glu, Ala, Asp, Gly, Asn or Ser
  MOD_RES (37)...(37): Xaa = Ser, Arg, Asn, Leu, Ile, His, Ala, Glu, Gly, Pro or Gln
  MOD_RES (38)...(38): Xaa = Ala, Asp, Asn or Thr
  MOD_RES (39)...(39): Xaa = Gly, Arg or Ser
  MOD_RES (40)...(40): Xaa = Lys, Asn, Arg, Ser or Thr
  MOD_RES (41)...(41): Xaa = Ala, Asp, Glu, Gly, Lys, Asn, Arg, Ser or Thr
XXXXXCXXXXXXCXXXXCXXXXXXXXCXCXXXXXXXXXXXXC

SEQ ID NO: 383 - protein, 37 aa, Artificial Sequence
  human calcium binding epidermal growth factor (CaEGF) domain
  MOD_RES (1)...(1): Xaa = Val, Thr, Ile, Lys, Glu or Ala
  MOD_RES (3)...(3): Xaa = Val or Ile
  MOD_RES (7)...(7): Xaa = Val, Ser, Leu, Ala, Asp, Glu, Gly, Lys, Asn, Arg or Thr
  MOD_RES (8)...(8): Xaa = Ser, Pro, Glu, Leu, Gln or Val
  MOD_RES (9)...(9): Xaa = Ser, Gly, Asn, Asp, Ile or Val
  MOD_RES (10)...(10): Xaa = Pro, Ala or Ser
  MOD_RES (12)...(12): Xaa = Val, Thr, Ser, Arg, Gln, Pro, Asn, Met, Leu, Lys, Ile, His, Gly, Glu, Asp or Ala
  MOD_RES (13)...(13): Xaa = Ser, Pro, Glu, Leu, Gln or Val
  MOD_RES (14)...(14): Xaa = Gly, Asp, Asn or Ser
  MOD_RES (15)...(15): Xaa = Ser, Arg, Gln, Asn, Leu, Lys, Ile, His, Ala or Gly
  MOD_RES (16)...(16): Xaa = Ile, Lys, Asn, Arg, Ser or Thr
  MOD_RES (18)...(18): Xaa = Val, Gln, Leu, Lys, Ile or Glu
  MOD_RES (20)...(20): Xaa = Thr, Ser, Leu or Ile
  MOD_RES (21)...(21): Xaa = Val, Gln, Pro, Leu, Glu or Ala
  MOD_RES (23)...(23): Xaa = Ser or Gly
  MOD_RES (24)...(24): Xaa = Thr or Phe
  MOD_RES (25)...(25): Xaa = Ser, Arg, Gln, Lys or His
  MOD_RES (27)...(27): Xaa = Val, Ser, Arg, Gln, Asn, Met, Leu, Lys, Ile, His, Gly, Glu or Asp
  MOD_RES (29)...(29): Xaa = Val, Pro, Leu, Ala, His, Asn, Arg, Ser or Thr
  MOD_RES (30)...(30): Xaa = Gln, Pro, Glu, Ala, Lys or Thr
  MOD_RES (32)...(32): Xaa = Tyr or Phe
  MOD_RES (33)...(33): Xaa = Thr, Ser, Ala, Glu, Lys, Leu, Met, Pro, Gln or Val
  MOD_RES (34)...(34): Xaa = Gly, Leu, Pro, Gln or Arg
  MOD_RES (35)...(35): Xaa = Val, Thr, Gln, Pro, Leu, Lys, Ile, Glu, Ala, Asp, Gly, Asn or Ser
  MOD_RES (36)...(36): Xaa = Ser, Arg, Asn, Leu, Ile, His, Ala, Glu, Gly, Pro or Gln
XXXXXCXXXXCXXXXXCXXXXXXXXCXCXXXXXXXXC

SEQ ID NO: 384 - protein, 38 aa, Artificial Sequence
  human calcium binding epidermal growth factor (CaEGF) domain
  MOD_RES (1)...(1): Xaa = Val, Thr, Ile, Lys, Glu or Ala
  MOD_RES (3)...(3): Xaa = Val or Ile
  MOD_RES (7)...(7): Xaa = Val, Ser, Leu, Ala, Asp, Glu, Gly, Lys, Asn, Arg or Thr
  MOD_RES (8)...(8): Xaa = Ser, Pro, Glu, Leu, Gln or Val
  MOD_RES (9)...(9): Xaa = Ser, Gly, Asn, Asp, Ile or Val
  MOD_RES (10)...(10): Xaa = Pro, Ala or Ser
  MOD_RES (12)...(12): Xaa = Val, Thr, Ser, Arg, Gln, Pro, Asn, Met, Leu, Lys, Ile, His, Gly, Glu, Asp or Ala
  MOD_RES (13)...(13): Xaa = Ser, Pro, Glu, Leu, Gln or Val
  MOD_RES (14)...(14): Xaa = Gly, Asp, Asn or Ser
  MOD_RES (15)...(15): Xaa = Ser, Arg, Gln, Asn, Leu, Lys, Ile, His, Ala or Gly
  MOD_RES (16)...(16): Xaa = Ile, Lys, Asn, Arg, Ser or Thr
  MOD_RES (18)...(18): Xaa = Val, Gln, Leu, Lys, Ile or Glu
  MOD_RES (20)...(20): Xaa = Thr, Ser, Leu or Ile
  MOD_RES (21)...(21): Xaa = Val, Gln, Pro, Leu, Glu or Ala
  MOD_RES (23)...(23): Xaa = Ser or Gly
  MOD_RES (24)...(24): Xaa = Thr or Phe
  MOD_RES (25)...(25): Xaa = Ser, Arg, Gln, Lys or His
  MOD_RES (27)...(27): Xaa = Val, Ser, Arg, Gln, Asn, Met, Leu, Lys, Ile, His, Gly, Glu or Asp
  MOD_RES (29)...(29): Xaa = Val, Pro, Leu, Ala, His, Asn, Arg, Ser or Thr
  MOD_RES (30)...(30): Xaa = Gln, Pro, Glu, Ala, Lys or Thr
  MOD_RES (32)...(32): Xaa = Tyr or Phe
  MOD_RES (33)...(33): Xaa = Thr, Ser, Ala, Glu, Lys, Leu, Met, Pro, Gln or Val
  MOD_RES (34)...(34): Xaa = Gly, Leu, Pro, Gln or Arg
  MOD_RES (35)...(35): Xaa = Val, Thr, Gln, Pro, Leu, Lys, Ile, Glu, Ala, Asp, Gly, Asn or Ser
  MOD_RES (36)...(36): Xaa = Ser, Arg, Asn, Leu, Ile, His, Ala, Glu, Gly, Pro or Gln
  MOD_RES (37)...(37): Xaa = Ala, Asp, Asn or Thr
XXXXXCXXXXCXXXXXCXXXXXXXXCXCXXXXXXXXXC

SEQ ID NO: 385 - protein, 39 aa, Artificial Sequence
  human calcium binding epidermal growth factor (CaEGF) domain
  MOD_RES (1)...(1): Xaa = Val, Thr, Ile, Lys, Glu or Ala
  MOD_RES (3)...(3): Xaa = Val or Ile
  MOD_RES (7)...(7): Xaa = Val, Ser, Leu, Ala, Asp, Glu, Gly, Lys, Asn, Arg or Thr
  MOD_RES (8)...(8): Xaa = Ser, Pro, Glu, Leu, Gln or Val
  MOD_RES (9)...(9): Xaa = Ser, Gly, Asn, Asp, Ile or Val
  MOD_RES (10)...(10): Xaa = Pro, Ala or Ser
  MOD_RES (12)...(12): Xaa = Val, Thr, Ser, Arg, Gln, Pro, Asn, Met, Leu, Lys, Ile, His, Gly, Glu, Asp or Ala
  MOD_RES (13)...(13): Xaa = Ser, Pro, Glu, Leu, Gln or Val
  MOD_RES (14)...(14): Xaa = Gly, Asp, Asn or Ser
  MOD_RES (15)...(15): Xaa = Ser, Arg, Gln, Asn, Leu, Lys, Ile, His, Ala or Gly
  MOD_RES (16)...(16): Xaa = Ile, Lys, Asn, Arg, Ser or Thr
  MOD_RES (18)...(18): Xaa = Val, Gln, Leu, Lys, Ile or Glu
  MOD_RES (20)...(20): Xaa = Thr, Ser, Leu or Ile
  MOD_RES (21)...(21): Xaa = Val, Gln, Pro, Leu, Glu or Ala
  MOD_RES (23)...(23): Xaa = Ser or Gly
  MOD_RES (24)...(24): Xaa = Thr or Phe
  MOD_RES (25)...(25): Xaa = Ser, Arg, Gln, Lys or His
  MOD_RES (27)...(27): Xaa = Val, Ser, Arg, Gln, Asn, Met, Leu, Lys, Ile, His, Gly, Glu or Asp
  MOD_RES (29)...(29): Xaa = Val, Pro, Leu, Ala, His, Asn, Arg, Ser or Thr
  MOD_RES (30)...(30): Xaa = Gln, Pro, Glu, Ala, Lys or Thr
  MOD_RES (32)...(32): Xaa = Tyr or Phe
  MOD_RES (33)...(33): Xaa = Thr, Ser, Ala, Glu, Lys, Leu, Met, Pro, Gln or Val
  MOD_RES (34)...(34): Xaa = Gly, Leu, Pro, Gln or Arg
  MOD_RES (35)...(35): Xaa = Val, Thr, Gln, Pro, Leu, Lys, Ile, Glu, Ala, Asp, Gly, Asn or Ser
  MOD_RES (36)...(36): Xaa = Ser, Arg, Asn, Leu, Ile, His, Ala, Glu, Gly, Pro or Gln
  MOD_RES (37)...(37): Xaa = Ala, Asp, Asn or Thr
  MOD_RES (38)...(38): Xaa = Gly, Arg or Ser
XXXXXCXXXXCXXXXXCXXXXXXXXCXCXXXXXXXXXXC

SEQ ID NO: 386 - protein, 40 aa, Artificial Sequence
  human calcium binding epidermal growth factor (CaEGF) domain
  MOD_RES (1)...(1): Xaa = Val, Thr, Ile, Lys, Glu or Ala
  MOD_RES (3)...(3): Xaa = Val or Ile
  MOD_RES (7)...(7): Xaa = Val, Ser, Leu, Ala, Asp, Glu, Gly, Lys, Asn, Arg or Thr
  MOD_RES (8)...(8): Xaa = Ser, Pro, Glu, Leu, Gln or Val
  MOD_RES (9)...(9): Xaa = Ser, Gly, Asn, Asp, Ile or Val
  MOD_RES (10)...(10): Xaa = Pro, Ala or Ser
  MOD_RES (12)...(12): Xaa = Val, Thr, Ser, Arg, Gln, Pro, Asn, Met, Leu, Lys, Ile, His, Gly, Glu, Asp or Ala
  MOD_RES (13)...(13): Xaa = Ser, Pro, Glu, Leu, Gln or Val
  MOD_RES (14)...(14): Xaa = Gly, Asp, Asn or Ser
  MOD_RES (15)...(15): Xaa = Ser, Arg, Gln, Asn, Leu, Lys, Ile, His, Ala or Gly
  MOD_RES (16)...(16): Xaa = Ile, Lys, Asn, Arg, Ser or Thr
  MOD_RES (18)...(18): Xaa = Val, Gln, Leu, Lys, Ile or Glu
  MOD_RES (20)...(20): Xaa = Thr, Ser, Leu or Ile
  MOD_RES (21)...(21): Xaa = Val, Gln, Pro, Leu, Glu or Ala
  MOD_RES (23)...(23): Xaa = Ser or Gly
  MOD_RES (24)...(24): Xaa = Thr or Phe
  MOD_RES (25)...(25): Xaa = Ser, Arg, Gln, Lys or His
  MOD_RES (27)...(27): Xaa = Val, Ser, Arg, Gln, Asn, Met, Leu, Lys, Ile, His, Gly, Glu or Asp
  MOD_RES (29)...(29): Xaa = Val, Pro, Leu, Ala, His, Asn, Arg, Ser or Thr
  MOD_RES (30)...(30): Xaa = Gln, Pro, Glu, Ala, Lys or Thr
  MOD_RES (32)...(32): Xaa = Tyr or Phe
  MOD_RES (33)...(33): Xaa = Thr, Ser, Ala, Glu, Lys, Leu, Met, Pro, Gln or Val
  MOD_RES (34)...(34): Xaa = Gly, Leu, Pro, Gln or Arg
  MOD_RES (35)...(35): Xaa = Val, Thr, Gln, Pro, Leu, Lys, Ile, Glu, Ala, Asp, Gly, Asn or Ser
  MOD_RES (36)...(36): Xaa = Ser, Arg, Asn, Leu, Ile, His, Ala, Glu, Gly, Pro or Gln
  MOD_RES (37)...(37): Xaa = Ala, Asp, Asn or Thr
  MOD_RES (38)...(38): Xaa = Gly, Arg or Ser
  MOD_RES (39)...(39): Xaa = Lys, Asn, Arg, Ser or Thr
XXXXXCXXXXCXXXXXCXXXXXXXXCXCXXXXXXXXXXXC

SEQ ID NO: 387 - protein, 41 aa, Artificial Sequence
  human calcium binding epidermal growth factor (CaEGF) domain
  MOD_RES (1)...(1): Xaa = Val, Thr, Ile, Lys, Glu or Ala
  MOD_RES (3)...(3): Xaa = Val or Ile
  MOD_RES (7)...(7): Xaa = Val, Ser, Leu, Ala, Asp, Glu, Gly, Lys, Asn, Arg or Thr
  MOD_RES (8)...(8): Xaa = Ser, Pro, Glu, Leu, Gln or Val
  MOD_RES (9)...(9): Xaa = Ser, Gly, Asn, Asp, Ile or Val
  MOD_RES (10)...(10): Xaa = Pro, Ala or Ser
  MOD_RES (12)...(12): Xaa = Val, Thr, Ser, Arg, Gln, Pro, Asn, Met, Leu, Lys, Ile, His, Gly, Glu, Asp or Ala
  MOD_RES (13)...(13): Xaa = Ser, Pro, Glu, Leu, Gln or Val
  MOD_RES (14)...(14): Xaa = Gly, Asp, Asn or Ser
  MOD_RES (15)...(15): Xaa = Ser, Arg, Gln, Asn, Leu, Lys, Ile, His, Ala or Gly
  MOD_RES (16)...(16): Xaa = Ile, Lys, Asn, Arg, Ser or Thr
  MOD_RES (18)...(18): Xaa = Val, Gln, Leu, Lys, Ile or Glu
  MOD_RES (20)...(20): Xaa = Thr, Ser, Leu or Ile
  MOD_RES (21)...(21): Xaa = Val, Gln, Pro, Leu, Glu or Ala
  MOD_RES (23)...(23): Xaa = Ser or Gly
  MOD_RES (24)...(24): Xaa = Thr or Phe
  MOD_RES (25)...(25): Xaa = Ser, Arg, Gln, Lys or His
  MOD_RES (27)...(27): Xaa = Val, Ser, Arg, Gln, Asn, Met, Leu, Lys, Ile, His, Gly, Glu or Asp
  MOD_RES (29)...(29): Xaa = Val, Pro, Leu, Ala, His, Asn, Arg, Ser or Thr
  MOD_RES (30)...(30): Xaa = Gln, Pro, Glu, Ala, Lys or Thr
  MOD_RES (32)...(32): Xaa = Tyr or Phe
  MOD_RES (33)...(33): Xaa = Thr, Ser, Ala, Glu, Lys, Leu, Met, Pro, Gln or Val
  MOD_RES (34)...(34): Xaa = Gly, Leu, Pro, Gln or Arg
  MOD_RES (35)...(35): Xaa = Val, Thr, Gln, Pro, Leu, Lys, Ile, Glu, Ala, Asp, Gly, Asn or Ser
  MOD_RES (36)...(36): Xaa = Ser, Arg, Asn, Leu, Ile, His, Ala, Glu, Gly, Pro or Gln
  MOD_RES (37)...(37): Xaa = Ala, Asp, Asn or Thr
  MOD_RES (38)...(38): Xaa = Gly, Arg or Ser
  MOD_RES (39)...(39): Xaa = Lys, Asn, Arg, Ser or Thr
  MOD_RES (40)...(40): Xaa = Ala, Asp, Glu, Gly, Lys, Asn, Arg, Ser or Thr
XXXXXCXXXXCXXXXXCXXXXXXXXCXCXXXXXXXXXXXXC

SEQ ID NO: 388 - protein, 38 aa, Artificial Sequence
  human calcium binding epidermal growth factor (CaEGF) domain
  MOD_RES (1)...(1): Xaa = Val, Thr, Ile, Lys, Glu or Ala
  MOD_RES (3)...(3): Xaa = Val or Ile
  MOD_RES (7)...(7): Xaa = Val, Ser, Leu, Ala, Asp, Glu, Gly, Lys, Asn, Arg or Thr
  MOD_RES (8)...(8): Xaa = Ser, Pro, Glu, Leu, Gln or Val
  MOD_RES (9)...(9): Xaa = Ser, Gly, Asn, Asp, Ile or Val
  MOD_RES (10)...(10): Xaa = Pro, Ala or Ser
  MOD_RES (11)...(11): Xaa = Asp, Gly, His, Asn, Arg or Ser
  MOD_RES (13)...(13): Xaa = Val, Thr, Ser, Arg, Gln, Pro, Asn, Met, Leu, Lys, Ile, His, Gly, Glu, Asp or Ala
  MOD_RES (14)...(14): Xaa = Ser, Arg, Asn or His
  MOD_RES (15)...(15): Xaa = Gly, Asp, Asn or Ser
  MOD_RES (16)...(16): Xaa = Ser, Arg, Gln, Asn, Leu, Lys, Ile, His, Ala or Gly
  MOD_RES (17)...(17): Xaa = Ile, Lys, Asn, Arg, Ser or Thr
  MOD_RES (19)...(19): Xaa = Val, Gln, Leu, Lys, Ile or Glu
  MOD_RES (21)...(21): Xaa = Thr, Ser, Leu or Ile
  MOD_RES (22)...(22): Xaa = Val, Gln, Pro, Leu, Glu or Ala
  MOD_RES (24)...(24): Xaa = Ser or Gly
  MOD_RES (25)...(25): Xaa = Thr or Phe
  MOD_RES (26)...(26): Xaa = Ser, Arg, Gln, Lys or His
  MOD_RES (28)...(28): Xaa = Val, Ser, Arg, Gln, Asn, Met, Leu, Lys, Ile, His, Gly, Glu or Asp
  MOD_RES (30)...(30): Xaa = Val, Pro, Leu, Ala, His, Asn, Arg, Ser or Thr
  MOD_RES (31)...(31): Xaa = Gln, Pro, Glu, Ala, Lys or Thr
  MOD_RES (33)...(33): Xaa = Tyr or Phe
  MOD_RES (34)...(34): Xaa = Thr, Ser, Ala, Glu, Lys, Leu, Met, Pro, Gln or Val
  MOD_RES (35)...(35): Xaa = Gly, Leu, Pro, Gln or Arg
  MOD_RES (36)...(36): Xaa = Val, Thr, Gln, Pro, Leu, Lys, Ile, Glu, Ala, Asp, Gly, Asn or Ser
  MOD_RES (37)...(37): Xaa = Ser, Arg, Asn, Leu, Ile, His, Ala, Glu, Gly, Pro or Gln
XXXXXCXXXXXCXXXXXCXXXXXXXXCXCXXXXXXXXC

SEQ ID NO: 389 - protein, 39 aa, Artificial Sequence
  human calcium binding epidermal growth factor (CaEGF) domain
  MOD_RES (1)...(1): Xaa = Val, Thr, Ile, Lys, Glu or Ala
  MOD_RES (3)...(3): Xaa = Val or Ile
  MOD_RES (7)...(7): Xaa = Val, Ser, Leu, Ala, Asp, Glu, Gly, Lys, Asn, Arg or Thr
  MOD_RES (8)...(8): Xaa = Ser, Pro, Glu, Leu, Gln or Val
  MOD_RES (9)...(9): Xaa = Ser, Gly, Asn, Asp, Ile or Val
  MOD_RES (10)...(10): Xaa = Pro, Ala or Ser
  MOD_RES (11)...(11): Xaa = Asp, Gly, His, Asn, Arg or Ser
  MOD_RES (13)...(13): Xaa = Val, Thr, Ser, Arg, Gln, Pro, Asn, Met, Leu, Lys, Ile, His, Gly, Glu, Asp or Ala
  MOD_RES (14)...(14): Xaa = Ser, Arg, Asn or His
  MOD_RES (15)...(15): Xaa = Gly, Asp, Asn or Ser
  MOD_RES (16)...(16): Xaa = Ser, Arg, Gln, Asn, Leu, Lys, Ile, His, Ala or Gly
  MOD_RES (17)...(17): Xaa = Ile, Lys, Asn, Arg, Ser or Thr
  MOD_RES (19)...(19): Xaa = Val, Gln, Leu, Lys, Ile or Glu
  MOD_RES (21)...(21): Xaa = Thr, Ser, Leu or Ile
  MOD_RES (22)...(22): Xaa = Val, Gln, Pro, Leu, Glu or Ala
  MOD_RES (24)...(24): Xaa = Ser or Gly
  MOD_RES (25)...(25): Xaa = Thr or Phe
  MOD_RES (26)...(26): Xaa = Ser, Arg, Gln, Lys or His
  MOD_RES (28)...(28): Xaa = Val, Ser, Arg, Gln, Asn, Met, Leu, Lys, Ile, His, Gly, Glu or Asp
  MOD_RES (30)...(30): Xaa = Val, Pro, Leu, Ala, His, Asn, Arg, Ser or Thr
  MOD_RES (31)...(31): Xaa = Gln, Pro, Glu, Ala, Lys or Thr
  MOD_RES (33)...(33): Xaa = Tyr or Phe
  MOD_RES (34)...(34): Xaa = Thr, Ser, Ala, Glu, Lys, Leu, Met, Pro, Gln or Val
  MOD_RES (35)...(35): Xaa = Gly, Leu, Pro, Gln or Arg
  MOD_RES (36)...(36): Xaa = Val, Thr, Gln, Pro, Leu, Lys, Ile, Glu, Ala, Asp, Gly, Asn or Ser
  MOD_RES (37)...(37): Xaa = Ser, Arg, Asn, Leu, Ile, His, Ala, Glu, Gly, Pro or Gln
  MOD_RES (38)...(38): Xaa = Ala, Asp, Asn or Thr
XXXXXCXXXXXCXXXXXCXXXXXXXXCXCXXXXXXXXXC

SEQ ID NO: 390 - protein, 40 aa, Artificial Sequence
  human calcium binding epidermal growth factor (CaEGF) domain
  MOD_RES (1)...(1): Xaa = Val, Thr, Ile, Lys, Glu or Ala
  MOD_RES (3)...(3): Xaa = Val or Ile
  MOD_RES (7)...(7): Xaa = Val, Ser, Leu, Ala, Asp, Glu, Gly, Lys, Asn, Arg or Thr
  MOD_RES (8)...(8): Xaa = Ser, Pro, Glu, Leu, Gln or Val
  MOD_RES (9)...(9): Xaa = Ser, Gly, Asn, Asp, Ile or Val
  MOD_RES (10)...(10): Xaa = Pro, Ala or Ser
  MOD_RES (11)...(11): Xaa = Asp, Gly, His, Asn, Arg or Ser
  MOD_RES (13)...(13): Xaa = Val, Thr, Ser, Arg, Gln, Pro, Asn, Met, Leu, Lys, Ile, His, Gly, Glu, Asp or Ala
  MOD_RES (14)...(14): Xaa = Ser, Arg, Asn or His
  MOD_RES (15)...(15): Xaa = Gly, Asp, Asn or Ser
  MOD_RES (16)...(16): Xaa = Ser, Arg, Gln, Asn, Leu, Lys, Ile, His, Ala or Gly
  MOD_RES (17)...(17): Xaa = Ile, Lys, Asn, Arg, Ser or Thr
  MOD_RES (19)...(19): Xaa = Val, Gln, Leu, Lys, Ile or Glu
  MOD_RES (21)...(21): Xaa = Thr, Ser, Leu or Ile
  MOD_RES (22)...(22): Xaa = Val, Gln, Pro, Leu, Glu or Ala
  MOD_RES (24)...(24): Xaa = Ser or Gly
  MOD_RES (25)...(25): Xaa = Thr or Phe
  MOD_RES (26)...(26): Xaa = Ser, Arg, Gln, Lys or His
  MOD_RES (28)...(28): Xaa = Val, Ser, Arg, Gln, Asn, Met, Leu, Lys, Ile, His, Gly, Glu or Asp
  MOD_RES (30)...(30): Xaa = Val, Pro, Leu, Ala, His, Asn, Arg, Ser or Thr
  MOD_RES (31)...(31): Xaa = Gln, Pro, Glu, Ala, Lys or Thr
  MOD_RES (33)...(33): Xaa = Tyr or Phe
  MOD_RES (34)...(34): Xaa = Thr, Ser, Ala, Glu, Lys, Leu, Met, Pro, Gln or Val
  MOD_RES (35)...(35): Xaa = Gly, Leu, Pro, Gln or Arg
  MOD_RES (36)...(36): Xaa = Val, Thr, Gln, Pro, Leu, Lys, Ile, Glu, Ala, Asp, Gly, Asn or Ser
  MOD_RES (37)...(37): Xaa = Ser, Arg, Asn, Leu, Ile, His, Ala, Glu, Gly, Pro or Gln
  MOD_RES (38)...(38): Xaa = Ala, Asp, Asn or Thr
  MOD_RES (39)...(39): Xaa = Gly, Arg or Ser
XXXXXCXXXXXCXXXXXCXXXXXXXXCXCXXXXXXXXXXC

SEQ ID NO: 391 - protein, 41 aa, Artificial Sequence
  human calcium binding epidermal growth factor (CaEGF) domain
  MOD_RES (1)...(1): Xaa = Val, Thr, Ile, Lys, Glu or Ala
  MOD_RES (3)...(3): Xaa = Val or Ile
  MOD_RES (7)...(7): Xaa = Val, Ser, Leu, Ala, Asp, Glu, Gly, Lys, Asn, Arg or Thr
  MOD_RES (8)...(8): Xaa = Ser, Pro, Glu, Leu, Gln or Val
  MOD_RES (9)...(9): Xaa = Ser, Gly, Asn, Asp, Ile or Val
  MOD_RES (10)...(10): Xaa = Pro, Ala or Ser
  MOD_RES (11)...(11): Xaa = Asp, Gly, His, Asn, Arg or Ser
  MOD_RES (13)...(13): Xaa = Val, Thr, Ser, Arg, Gln, Pro, Asn, Met, Leu, Lys, Ile, His, Gly, Glu, Asp or Ala
  MOD_RES (14)...(14): Xaa = Ser, Arg, Asn or His
  MOD_RES (15)...(15): Xaa = Gly, Asp, Asn or Ser
  MOD_RES (16)...(16): Xaa = Ser, Arg, Gln, Asn, Leu, Lys, Ile, His, Ala or Gly
  MOD_RES (17)...(17): Xaa = Ile, Lys, Asn, Arg, Ser or Thr
  MOD_RES (19)...(19): Xaa = Val, Gln, Leu, Lys, Ile or Glu
  MOD_RES (21)...(21): Xaa = Thr, Ser, Leu or Ile
  MOD_RES (22)...(22): Xaa = Val, Gln, Pro, Leu, Glu or Ala
  MOD_RES (24)...(24): Xaa = Ser or Gly
  MOD_RES (25)...(25): Xaa = Thr or Phe
  MOD_RES (26)...(26): Xaa = Ser, Arg, Gln, Lys or His
  MOD_RES (28)...(28): Xaa = Val, Ser, Arg, Gln, Asn, Met, Leu, Lys, Ile, His, Gly, Glu or Asp
  MOD_RES (30)...(30): Xaa = Val, Pro, Leu, Ala, His, Asn, Arg, Ser or Thr
  MOD_RES (31)...(31): Xaa = Gln, Pro, Glu, Ala, Lys or Thr
  MOD_RES (33)...(33): Xaa = Tyr or Phe
  MOD_RES (34)...(34): Xaa = Thr, Ser, Ala, Glu, Lys, Leu, Met, Pro, Gln or Val
  MOD_RES (35)...(35): Xaa = Gly, Leu, Pro, Gln or Arg
  MOD_RES (36)...(36): Xaa = Val, Thr, Gln, Pro, Leu, Lys, Ile, Glu, Ala, Asp, Gly, Asn or Ser
  MOD_RES (37)...(37): Xaa = Ser, Arg, Asn, Leu, Ile, His, Ala, Glu, Gly, Pro or Gln
  MOD_RES (38)...(38): Xaa = Ala, Asp, Asn or Thr
  MOD_RES (39)...(39): Xaa = Gly, Arg or Ser
  MOD_RES (40)...(40): Xaa = Lys, Asn, Arg, Ser or Thr
XXXXXCXXXXXCXXXXXCXXXXXXXXCXCXXXXXXXXXXXC

SEQ ID NO: 392 - protein, 42 aa, Artificial Sequence
  human calcium binding epidermal growth factor (CaEGF) domain
  MOD_RES (1)...(1): Xaa = Val, Thr, Ile, Lys, Glu or Ala
  MOD_RES (3)...(3): Xaa = Val or Ile
  MOD_RES (7)...(7): Xaa = Val, Ser, Leu, Ala, Asp, Glu, Gly, Lys, Asn, Arg or Thr
  MOD_RES (8)...(8): Xaa = Ser, Pro, Glu, Leu, Gln or Val
  MOD_RES (9)...(9): Xaa = Ser, Gly, Asn, Asp, Ile or Val
  MOD_RES (10)...(10): Xaa = Pro, Ala or Ser
  MOD_RES (11)...(11): Xaa = Asp, Gly, His, Asn, Arg or Ser
  MOD_RES (13)...(13): Xaa = Val, Thr, Ser, Arg, Gln, Pro, Asn, Met, Leu, Lys, Ile, His, Gly, Glu, Asp or Ala
  MOD_RES (14)...(14): Xaa = Ser, Arg, Asn or His
  MOD_RES (15)...(15): Xaa = Gly, Asp, Asn or Ser
  MOD_RES (16)...(16): Xaa = Ser, Arg, Gln, Asn, Leu, Lys, Ile, His, Ala or Gly
  MOD_RES (17)...(17): Xaa = Ile, Lys, Asn, Arg, Ser or Thr
  MOD_RES (19)...(19): Xaa = Val, Gln, Leu, Lys, Ile or Glu
  MOD_RES (21)...(21): Xaa = Thr, Ser, Leu or Ile
  MOD_RES (22)...(22): Xaa = Val, Gln, Pro, Leu, Glu or Ala
  MOD_RES (24)...(24): Xaa = Ser or Gly
  MOD_RES (25)...(25): Xaa = Thr or Phe
  MOD_RES (26)...(26): Xaa = Ser, Arg, Gln, Lys or His
  MOD_RES (28)...(28): Xaa = Val, Ser, Arg, Gln, Asn, Met, Leu, Lys, Ile, His, Gly, Glu or Asp
  MOD_RES (30)...(30): Xaa = Val, Pro, Leu, Ala, His, Asn, Arg, Ser or Thr
  MOD_RES (31)...(31): Xaa = Gln, Pro, Glu, Ala, Lys or Thr
  MOD_RES (33)...(33): Xaa = Tyr or Phe
  MOD_RES (34)...(34): Xaa = Thr, Ser, Ala, Glu, Lys, Leu, Met, Pro, Gln or Val
  MOD_RES (35)...(35): Xaa = Gly, Leu, Pro, Gln or Arg
  MOD_RES (36)...(36): Xaa = Val, Thr, Gln, Pro, Leu, Lys, Ile, Glu, Ala, Asp, Gly, Asn or Ser
  MOD_RES (37)...(37): Xaa = Ser, Arg, Asn, Leu, Ile, His, Ala, Glu, Gly, Pro or Gln
  MOD_RES (38)...(38): Xaa = Ala, Asp, Asn or Thr
  MOD_RES (39)...(39): Xaa = Gly, Arg or Ser
  MOD_RES (40)...(40): Xaa = Lys, Asn, Arg, Ser or Thr
  MOD_RES (41)...(41): Xaa = Ala, Asp, Glu, Gly, Lys, Asn, Arg, Ser or Thr
XXXXXCXXXXXCXXXXXCXXXXXXXXCXCXXXXXXXXXXXXC

SEQ ID NO: 393 - protein, 39 aa, Artificial Sequence
  human calcium binding epidermal growth factor (CaEGF) domain
  MOD_RES (1)...(1): Xaa = Val, Thr, Ile, Lys, Glu or Ala
  MOD_RES (3)...(3): Xaa = Val or Ile
  MOD_RES (7)...(7): Xaa = Val, Ser, Leu, Ala, Asp, Glu, Gly, Lys, Asn, Arg or Thr
  MOD_RES (8)...(8): Xaa = Ser, Pro, Glu, Leu, Gln or Val
  MOD_RES (9)...(9): Xaa = Ser, Gly, Asn, Asp, Ile or Val
  MOD_RES (10)...(10): Xaa = Pro, Ala or Ser
  MOD_RES (11)...(11): Xaa = Asp, Gly, His, Asn, Arg or Ser
  MOD_RES (12)...(12): Xaa = Ala, Ile, Leu, Pro, Thr or Val
  MOD_RES (14)...(14): Xaa = Val, Thr, Ser, Arg, Gln, Pro, Asn, Met, Leu, Lys, Ile, His, Gly, Glu, Asp or Ala
  MOD_RES (15)...(15): Xaa = Ser, Arg, Asn or His
  MOD_RES (16)...(16): Xaa = Gly, Asp, Asn or Ser
  MOD_RES (17)...(17): Xaa = Ser, Arg, Gln, Asn, Leu, Lys, Ile, His, Ala or Gly
  MOD_RES (18)...(18): Xaa = Ile, Lys, Asn, Arg, Ser or Thr
  MOD_RES (20)...(20): Xaa = Val, Gln, Leu, Lys, Ile or Glu
  MOD_RES (22)...(22): Xaa = Thr, Ser, Leu or Ile
  MOD_RES (23)...(23): Xaa = Val, Gln, Pro, Leu, Glu or Ala
  MOD_RES (25)...(25): Xaa = Ser or Gly
  MOD_RES (26)...(26): Xaa = Thr or Phe
  MOD_RES (27)...(27): Xaa = Ser, Arg, Gln, Lys or His
  MOD_RES (29)...(29): Xaa = Val, Ser, Arg, Gln, Asn, Met, Leu, Lys, Ile, His, Gly, Glu or Asp
  MOD_RES (31)...(31): Xaa = Val, Pro, Leu, Ala, His, Asn, Arg, Ser or Thr
  MOD_RES (32)...(32): Xaa = Gln, Pro, Glu, Ala, Lys or Thr
  MOD_RES (34)...(34): Xaa = Tyr or Phe
  MOD_RES (35)...(35): Xaa = Thr, Ser, Ala, Glu, Lys, Leu, Met, Pro, Gln or Val
  MOD_RES (36)...(36): Xaa = Gly, Leu, Pro, Gln or Arg
  MOD_RES (37)...(37): Xaa = Val, Thr, Gln, Pro, Leu, Lys, Ile, Glu, Ala, Asp, Gly, Asn or Ser
  MOD_RES (38)...(38): Xaa = Ser, Arg, Asn, Leu, Ile, His, Ala, Glu, Gly, Pro or Gln
XXXXXCXXXXXXCXXXXXCXXXXXXXXCXCXXXXXXXXC

SEQ ID NO: 394 - protein, 40 aa, Artificial Sequence
  human calcium binding epidermal growth factor (CaEGF) domain
  MOD_RES (1)...(1): Xaa = Val, Thr, Ile, Lys, Glu or Ala
  MOD_RES (3)...(3): Xaa = Val or Ile
  MOD_RES (7)...(7): Xaa = Val, Ser, Leu, Ala, Asp, Glu, Gly, Lys, Asn, Arg or Thr
  MOD_RES (8)...(8): Xaa = Ser, Pro, Glu, Leu, Gln or Val
  MOD_RES (9)...(9): Xaa = Ser, Gly, Asn, Asp, Ile or Val
  MOD_RES (10)...(10): Xaa = Pro, Ala or Ser
  MOD_RES (11)...(11): Xaa = Asp, Gly, His, Asn, Arg or Ser
  MOD_RES (12)...(12): Xaa = Ala, Ile, Leu, Pro, Thr or Val
  MOD_RES (14)...(14): Xaa = Val, Thr, Ser, Arg, Gln, Pro, Asn, Met, Leu, Lys, Ile, His, Gly, Glu, Asp or Ala
  MOD_RES (15)...(15): Xaa = Ser, Arg, Asn or His
  MOD_RES (16)...(16): Xaa = Gly, Asp, Asn or Ser
  MOD_RES (17)...(17): Xaa = Ser, Arg, Gln, Asn, Leu, Lys, Ile, His, Ala or Gly
  MOD_RES (18)...(18): Xaa = Ile, Lys, Asn, Arg, Ser or Thr
  MOD_RES (20)...(20): Xaa = Val, Gln, Leu, Lys, Ile or Glu
  MOD_RES (22)...(22): Xaa = Thr, Ser, Leu or Ile
  MOD_RES (23)...(23): Xaa = Val, Gln, Pro, Leu, Glu or Ala
  MOD_RES (25)...(25): Xaa = Ser or Gly
  MOD_RES (26)...(26): Xaa = Thr or Phe
  MOD_RES (27)...(27): Xaa = Ser, Arg, Gln, Lys or His
  MOD_RES (29)...(29): Xaa = Val, Ser, Arg, Gln, Asn, Met, Leu, Lys, Ile, His, Gly, Glu or Asp
  MOD_RES (31)...(31): Xaa = Val, Pro, Leu, Ala, His, Asn, Arg, Ser or Thr
  MOD_RES (32)...(32): Xaa = Gln, Pro, Glu, Ala, Lys or Thr
  MOD_RES (34)...(34): Xaa = Tyr or Phe
  MOD_RES (35)...(35): Xaa = Thr, Ser, Ala, Glu, Lys, Leu, Met, Pro, Gln or Val
  MOD_RES (36)...(36): Xaa = Gly, Leu, Pro, Gln or Arg
  MOD_RES (37)...(37): Xaa = Val, Thr, Gln, Pro, Leu, Lys, Ile, Glu, Ala, Asp, Gly, Asn or Ser
  MOD_RES (38)...(38): Xaa = Ser, Arg, Asn, Leu, Ile, His, Ala, Glu, Gly, Pro or Gln
  MOD_RES (39)...(39): Xaa = Ala, Asp, Asn or Thr
XXXXXCXXXXXXCXXXXXCXXXXXXXXCXCXXXXXXXXXC

SEQ ID NO: 395 - protein, 41 aa, Artificial Sequence
  human calcium binding epidermal growth factor (CaEGF) domain
  MOD_RES (1)...(1): Xaa = Val, Thr, Ile, Lys, Glu or Ala
  MOD_RES (3)...(3): Xaa = Val or Ile
  MOD_RES (7)...(7): Xaa = Val, Ser, Leu, Ala, Asp, Glu, Gly, Lys, Asn, Arg or Thr
  MOD_RES (8)...(8): Xaa = Ser, Pro, Glu, Leu, Gln or Val
  MOD_RES (9)...(9): Xaa = Ser, Gly, Asn, Asp, Ile or Val
  MOD_RES (10)...(10): Xaa = Pro, Ala or Ser
  MOD_RES (11)...(11): Xaa = Asp, Gly, His, Asn, Arg or Ser
  MOD_RES (12)...(12): Xaa = Ala, Ile, Leu, Pro, Thr or Val
  MOD_RES (14)...(14): Xaa = Val, Thr, Ser, Arg, Gln, Pro, Asn, Met, Leu, Lys, Ile, His, Gly, Glu, Asp or Ala
  MOD_RES (15)...(15): Xaa = Ser, Arg, Asn or His
  MOD_RES (16)...(16): Xaa = Gly, Asp, Asn or Ser
  MOD_RES (17)...(17): Xaa = Ser, Arg, Gln, Asn, Leu, Lys, Ile, His, Ala or Gly
  MOD_RES (18)...(18): Xaa = Ile, Lys, Asn, Arg, Ser or Thr
  MOD_RES (20)...(20): Xaa = Val, Gln, Leu, Lys, Ile or Glu
  MOD_RES (22)...(22): Xaa = Thr, Ser, Leu or Ile
  MOD_RES (23)...(23): Xaa = Val, Gln, Pro, Leu, Glu or Ala
  MOD_RES (25)...(25): Xaa = Ser or Gly
  MOD_RES (26)...(26): Xaa = Thr or Phe
  MOD_RES (27)...(27): Xaa = Ser, Arg, Gln, Lys or His
  MOD_RES (29)...(29): Xaa = Val, Ser, Arg, Gln, Asn, Met, Leu, Lys, Ile, His, Gly, Glu or Asp
  MOD_RES (31)...(31): Xaa = Val, Pro, Leu, Ala, His, Asn, Arg, Ser or Thr
  MOD_RES (32)...(32): Xaa = Gln, Pro, Glu, Ala, Lys or Thr
  MOD_RES (34)...(34): Xaa = Tyr or Phe
  MOD_RES (35)...(35): Xaa = Thr, Ser, Ala, Glu, Lys, Leu, Met, Pro, Gln or Val
  MOD_RES (36)...(36): Xaa = Gly, Leu, Pro, Gln or Arg
  MOD_RES (37)...(37): Xaa = Val, Thr, Gln, Pro, Leu, Lys, Ile, Glu, Ala, Asp, Gly, Asn or Ser
  MOD_RES (38)...(38): Xaa = Ser, Arg, Asn, Leu, Ile, His, Ala, Glu, Gly, Pro or Gln
  MOD_RES (39)...(39): Xaa = Ala, Asp, Asn or Thr
  MOD_RES (40)...(40): Xaa = Gly, Arg or Ser
XXXXXCXXXXXXCXXXXXCXXXXXXXXCXCXXXXXXXXXXC

SEQ ID NO: 396 - protein, 42 aa, Artificial Sequence
  human calcium binding epidermal growth factor (CaEGF) domain
  MOD_RES (1)...(1): Xaa = Val, Thr, Ile, Lys, Glu or Ala
  MOD_RES (3)...(3): Xaa = Val or Ile
  MOD_RES (7)...(7): Xaa = Val, Ser, Leu, Ala, Asp, Glu, Gly, Lys, Asn, Arg or Thr
  MOD_RES (8)...(8): Xaa = Ser, Pro, Glu, Leu, Gln or Val
  MOD_RES (9)...(9): Xaa = Ser, Gly, Asn, Asp, Ile or Val
  MOD_RES (10)...(10): Xaa = Pro, Ala or Ser
  MOD_RES (11)...(11): Xaa = Asp, Gly, His, Asn, Arg or Ser
  MOD_RES (12)...(12): Xaa = Ala, Ile, Leu, Pro, Thr or Val
  MOD_RES (14)...(14): Xaa = Val, Thr, Ser, Arg, Gln, Pro, Asn, Met, Leu, Lys, Ile, His, Gly, Glu, Asp or Ala
  MOD_RES (15)...(15): Xaa = Ser, Arg, Asn or His
  MOD_RES (16)...(16): Xaa = Gly, Asp, Asn or Ser
  MOD_RES (17)...(17): Xaa = Ser, Arg, Gln, Asn, Leu, Lys, Ile, His, Ala or Gly
  MOD_RES (18)...(18): Xaa = Ile, Lys, Asn, Arg, Ser or Thr
  MOD_RES (20)...(20): Xaa = Val, Gln, Leu, Lys, Ile or Glu
  MOD_RES (22)...(22): Xaa = Thr, Ser, Leu or Ile
  MOD_RES (23)...(23): Xaa = Val, Gln, Pro, Leu, Glu or Ala
  MOD_RES (25)...(25): Xaa = Ser or Gly
  MOD_RES (26)...(26): Xaa = Thr or Phe
  MOD_RES (27)...(27): Xaa = Ser, Arg, Gln, Lys or His
  MOD_RES (29)...(29): Xaa = Val, Ser, Arg, Gln, Asn, Met, Leu, Lys, Ile, His, Gly, Glu or Asp
  MOD_RES (31)...(31): Xaa = Val, Pro, Leu, Ala, His, Asn, Arg, Ser or Thr
  MOD_RES (32)...(32): Xaa = Gln, Pro, Glu, Ala, Lys or Thr
  MOD_RES (34)...(34): Xaa = Tyr or Phe
  MOD_RES (35)...(35): Xaa = Thr, Ser, Ala, Glu, Lys, Leu, Met, Pro, Gln or Val
  MOD_RES (36)...(36): Xaa = Gly, Leu, Pro, Gln or Arg
  MOD_RES (37)...(37): Xaa = Val, Thr, Gln, Pro, Leu, Lys, Ile, Glu, Ala, Asp, Gly, Asn or Ser
  MOD_RES (38)...(38): Xaa = Ser, Arg, Asn, Leu, Ile, His, Ala, Glu, Gly, Pro or Gln
  MOD_RES (39)...(39): Xaa = Ala, Asp, Asn or Thr
  MOD_RES (40)...(40): Xaa = Gly, Arg or Ser
  MOD_RES (41)...(41): Xaa = Lys, Asn, Arg, Ser or Thr
XXXXXCXXXXXXCXXXXXCXXXXXXXXCXCXXXXXXXXXXXC

SEQ ID NO: 397 - protein, 43 aa, Artificial Sequence
  human calcium binding epidermal growth factor (CaEGF) domain
  MOD_RES (1)...(1): Xaa = Val, Thr, Ile, Lys, Glu or Ala
  MOD_RES (3)...(3): Xaa = Val or Ile
  MOD_RES (7)...(7): Xaa = Val, Ser, Leu, Ala, Asp, Glu, Gly, Lys, Asn, Arg or Thr
  MOD_RES (8)...(8): Xaa = Ser, Pro, Glu, Leu, Gln or Val
  MOD_RES (9)...(9): Xaa = Ser, Gly, Asn, Asp, Ile or Val
  MOD_RES (10)...(10): Xaa = Pro, Ala or Ser
  MOD_RES (11)...(11): Xaa = Asp, Gly, His, Asn, Arg or Ser
  MOD_RES (12)...(12): Xaa = Ala, Ile, Leu, Pro, Thr or Val
  MOD_RES (14)...(14): Xaa = Val, Thr, Ser, Arg, Gln, Pro, Asn, Met, Leu, Lys, Ile, His, Gly, Glu, Asp or Ala
  MOD_RES (15)...(15): Xaa = Ser, Arg, Asn or His
  MOD_RES (16)...(16): Xaa = Gly, Asp, Asn or Ser
  MOD_RES (17)...(17): Xaa = Ser, Arg, Gln, Asn, Leu, Lys, Ile, His, Ala or Gly
  MOD_RES (18)...(18): Xaa = Ile, Lys, Asn, Arg, Ser or Thr
  MOD_RES (20)...(20): Xaa = Val, Gln, Leu, Lys, Ile or Glu
  MOD_RES (22)...(22): Xaa = Thr, Ser, Leu or Ile
  MOD_RES (23)...(23): Xaa = Val, Gln, Pro, Leu, Glu or Ala
  MOD_RES (25)...(25): Xaa = Ser or Gly
  MOD_RES (26)...(26): Xaa = Thr or Phe
  MOD_RES (27)...(27): Xaa = Ser, Arg, Gln, Lys or His
  MOD_RES (29)...(29): Xaa = Val, Ser, Arg, Gln, Asn, Met, Leu, Lys, Ile, His, Gly, Glu or Asp
  MOD_RES (31)...(31): Xaa = Val, Pro, Leu, Ala, His, Asn, Arg, Ser or Thr
  MOD_RES (32)...(32): Xaa = Gln, Pro, Glu, Ala, Lys or Thr
  MOD_RES (34)...(34): Xaa = Tyr or Phe
  MOD_RES (35)...(35): Xaa = Thr, Ser, Ala, Glu, Lys, Leu, Met, Pro, Gln or Val
  MOD_RES (36)...(36): Xaa = Gly, Leu, Pro, Gln or Arg
  MOD_RES (37)...(37): Xaa = Val, Thr, Gln, Pro, Leu, Lys, Ile, Glu, Ala, Asp, Gly, Asn or Ser
  MOD_RES (38)...(38): Xaa = Ser, Arg, Asn, Leu, Ile, His, Ala, Glu, Gly, Pro or Gln
  MOD_RES (39)...(39): Xaa = Ala, Asp, Asn or Thr
  MOD_RES (40)...(40): Xaa = Gly, Arg or Ser
  MOD_RES (41)...(41): Xaa = Lys, Asn, Arg, Ser or Thr
  MOD_RES (42)...(42): Xaa = Ala, Asp, Glu, Gly, Lys, Asn, Arg, Ser or Thr
XXXXXCXXXXXXCXXXXXCXXXXXXXXCXCXXXXXXXXXXXXC

SEQ ID NO: 398 - DNA, 31 bp, Artificial Sequence
  Group 1 assembly PCR oligonucleotide 1
aaaaggcctcgagggcctgggtggcaatggt

SEQ ID NO: 399 - DNA, 72 bp, Artificial Sequence
  Group 1 assembly PCR oligonucleotide 2
  modified_base (25)...(25): n = g, a, c or t
cctgaaccaccacakhkaccgyksnbgcacggayycgrcrmacattcatyaayatctdyaccattgccaccc

SEQ ID NO: 400 - DNA, 75 bp, Artificial Sequence
  Group 1 assembly PCR oligonucleotide 3
  modified_base (16)...(16): n = g, a, c or t
cctgaaccaccacakntgscgyygykmhsgcacggayycgrcrmacattcatyaayatctdyaccattgccaccc

SEQ ID NO: 401 - DNA, 78 bp, Artificial Sequence
  Group 1 assembly PCR oligonucleotide 4
  modified_base (25)...(25): n = g, a, c or t
cctgaaccaccacakhkaccgyksnbgcaarbaybcgvahycwskbyacattcatyaayatctdyaccattgccaccc

SEQ ID NO: 402 - DNA, 81 bp, Artificial Sequence
  Group 1 assembly PCR oligonucleotide 5
  modified_base (16)...(16): n = g, a, c or t
cctgaaccaccacakntgscgyygykmhsgcaarbaybcgvahycwskbyacattcatyaayatctdyaccattgccaccc

SEQ ID NO: 403 - DNA, 81 bp, Artificial Sequence
  Group 1 assembly PCR oligonucleotide 6
tgaattttctgtatgaggttttgctaaacaactttcaacagtttcggccccagaggccctggagccacctgaaccaccaca

SEQ ID NO: 404 - DNA, 50 bp, Artificial Sequence
  Group 2 assembly PCR oligonucleotide 1
acggtgcctacccgtatgatgttccggattatgccccgggtggcaatggt

SEQ ID NO: 405 - DNA, 84 bp, Artificial Sequence
  Group 2 assembly PCR oligonucleotide 2
cctgaaccaccacaghktdbaccgghawagcctkscrsgcashbacakykawagcyacccdstrwatytwbaccattgccaccc

SEQ ID NO: 406 - DNA, 96 bp, Artificial Sequence
  Group 2 assembly PCR oligonucleotide 3
  modified_base (34)...(34): n = g, a, c or t
cctgaaccaccacakbykbtkcygkycbsabycngcdbawagcctkbgbkgcashbacakykawagcyacccdstrwatytwbaccattgccaccc

SEQ ID NO: 407 - DNA, 31 bp, Artificial Sequence
  Group 2 assembly PCR oligonucleotide 4
aaaaggccccagaggcccctgaaccaccaca

SEQ ID NO: 408 - DNA, 31 bp, Artificial Sequence; identical to SEQ ID NO: 398
  ligated DNA PCR amplification primer

SEQ ID NO: 409 - DNA, 31 bp, Artificial Sequence; identical to SEQ ID NO: 407
  ligated DNA PCR amplification primer

SEQ ID NO: 410 - protein, 20 aa, Artificial Sequence
  glycine, serine flexible linker
SGGGGSGGGGSGGGGSGGGG

SEQ ID NO: 411 - protein, 39 aa, Artificial Sequence
  A domain
  MOD_RES (1)...(39): Xaa = any amino acid
  DISULFID (1)...(15)
  DISULFID (9)...(28)
  DISULFID (22)...(39)
CXXXXEFRCAXXGRCIPSSWVCDGEDDCGDGSDEXXXXC

SEQ ID NO: 412 - protein, 40 aa, Artificial Sequence
  A domain
  MOD_RES (1)...(40): Xaa = any amino acid
  DISULFID (1)...(15)
  DISULFID (9)...(28)
  DISULFID (22)...(40)
CXXXXEFRCAXXGRCIPSSWVCDGEDDCGDGSDEXXXXXC

SEQ ID NO: 413 - protein, 41 aa, Artificial Sequence
  A domain
  MOD_RES (1)...(41): Xaa = any amino acid
  DISULFID (1)...(15)
  DISULFID (9)...(28)
  DISULFID (22)...(41)
CXXXXEFRCAXXGRCIPSSWVCDGEDDCGDGSDEXXXXXXC

SEQ ID NO: 414 - protein, 40 aa, Artificial Sequence
  A domain
  MOD_RES (1)...(40): Xaa = any amino acid
  DISULFID (1)...(16)
  DISULFID (10)...(29)
  DISULFID (23)...(40)
CXXXXXEFRCAXXGRCIPSSWVCDGEDDCGDGSDEXXXXC

SEQ ID NO: 415 - protein, 41 aa, Artificial Sequence
  A domain
  MOD_RES (1)...(41): Xaa = any amino acid
  DISULFID (1)...(16)
  DISULFID (10)...(29)
  DISULFID (23)...(41)
CXXXXXEFRCAXXGRCIPSSWVCDGEDDCGDGSDEXXXXXC

SEQ ID NO: 416 - protein, 42 aa, Artificial Sequence
  A domain
  MOD_RES (1)...(42): Xaa = any amino acid
  DISULFID (1)...(16)
  DISULFID (10)...(29)
  DISULFID (23)...(42)
CXXXXXEFRCAXXGRCIPSSWVCDGEDDCGDGSDEXXXXXXC

SEQ ID NO: 417 - protein, 41 aa, Artificial Sequence
  A domain
  MOD_RES (1)...(41): Xaa = any amino acid
  DISULFID (1)...(17)
  DISULFID (11)...(30)
  DISULFID (24)...(41)
CXXXXXXEFRCAXXGRCIPSSWVCDGEDDCGDGSDEXXXXC

SEQ ID NO: 418 - protein, 42 aa, Artificial Sequence
  A domain
  MOD_RES (1)...(42): Xaa = any amino acid
  DISULFID (1)...(17)
  DISULFID (11)...(30)
  DISULFID (24)...(42)
CXXXXXXEFRCAXXGRCIPSSWVCDGEDDCGDGSDEXXXXXC

SEQ ID NO: 419 - protein, 43 aa, Artificial Sequence
  A domain
  MOD_RES (1)...(43): Xaa = any amino acid
  DISULFID (1)...(17)
  DISULFID (11)...(30)
  DISULFID (24)...(43)
CXXXXXXEFRCAXXGRCIPSSWVCDGEDDCGDGSDEXXXXXXC

SEQ ID NO: 420 - protein, 40 aa, Artificial Sequence
  A domain
  MOD_RES (1)...(40): Xaa = any amino acid
  DISULFID (1)...(16)
  DISULFID (9)...(29)
  DISULFID (23)...(40)
CXXXXEFRCAXXXGRCIPSSWVCDGEDDCGDGSDEXXXXC

SEQ ID NO: 421 - protein, 41 aa, Artificial Sequence
  A domain
  MOD_RES (1)...(41): Xaa = any amino acid
  DISULFID (1)...(16)
  DISULFID (9)...(29)
  DISULFID (23)...(41)
CXXXXEFRCAXXXGRCIPSSWVCDGEDDCGDGSDEXXXXXC

SEQ ID NO: 422 - protein, 42 aa, Artificial Sequence
  A domain
  MOD_RES (1)...(42): Xaa = any amino acid
  DISULFID (1)...(16)
  DISULFID (9)...(29)
  DISULFID (23)...(42)
CXXXXEFRCAXXXGRCIPSSWVCDGEDDCGDGSDEXXXXXXC

SEQ ID NO: 423 - protein, 41 aa, Artificial Sequence
  A domain
  MOD_RES (1)...(41): Xaa = any amino acid
  DISULFID (1)...(17)
  DISULFID (10)...(30)
  DISULFID (24)...(41)
CXXXXXEFRCAXXXGRCIPSSWVCDGEDDCGDGSDEXXXXC

SEQ ID NO: 424 - protein, 42 aa, Artificial Sequence
  A domain
  MOD_RES (1)...(42): Xaa = any amino acid
  DISULFID (1)...(17)
  DISULFID (10)...(30)
  DISULFID (24)...(42)
CXXXXXEFRCAXXXGRCIPSSWVCDGEDDCGDGSDEXXXXXC

SEQ ID NO: 425 - protein, 43 aa, Artificial Sequence
  A domain
  MOD_RES (1)...(43): Xaa = any amino acid
  DISULFID (1)...(17)
  DISULFID (10)...(30)
  DISULFID (24)...(43)
CXXXXXEFRCAXXXGRCIPSSWVCDGEDDCGDGSDEXXXXXXC

SEQ ID NO: 426 - protein, 42 aa, Artificial Sequence
  A domain
  MOD_RES (1)...(42): Xaa = any amino acid
  DISULFID (1)...(18)
  DISULFID (11)...(31)
  DISULFID (25)...(42)
CXXXXXXEFRCAXXXGRCIPSSWVCDGEDDCGDGSDEXXXXC

SEQ ID NO: 427 - protein, 43 aa, Artificial Sequence
  A domain
  MOD_RES (1)...(43): Xaa = any amino acid
  DISULFID (1)...(18)
  DISULFID (11)...(31)
  DISULFID (25)...(43)
CXXXXXXEFRCAXXXGRCIPSSWVCDGEDDCGDGSDEXXXXXC

SEQ ID NO: 428 - protein, 44 aa, Artificial Sequence
  A domain
  MOD_RES (1)...(44): Xaa = any amino acid
  DISULFID (1)...(18)
  DISULFID (11)...(31)
  DISULFID (25)...(44)
CXXXXXXEFRCAXXXGRCIPSSWVCDGEDDCGDGSDEXXXXXXC

SEQ ID NO: 429 - protein, 41 aa, Artificial Sequence
  A domain
  MOD_RES (1)...(41): Xaa = any amino acid
  DISULFID (1)...(17)
  DISULFID (9)...(30)
  DISULFID (24)...(41)
CXXXXEFRCAXXXXGRCIPSSWVCDGEDDCGDGSDEXXXXC

SEQ ID NO: 430 - protein, 42 aa, Artificial Sequence
  A domain
  MOD_RES (1)...(42): Xaa = any amino acid
  DISULFID (1)...(17)
  DISULFID (9)...(30)
  DISULFID (24)...(42)
CXXXXEFRCAXXXXGRCIPSSWVCDGEDDCGDGSDEXXXXXC

SEQ ID NO: 431 - protein, 43 aa, Artificial Sequence
  A domain
  MOD_RES (1)...(43): Xaa = any amino acid
  DISULFID (1)...(17)
  DISULFID (9)...(30)
  DISULFID (24)...(43)
CXXXXEFRCAXXXXGRCIPSSWVCDGEDDCGDGSDEXXXXXXC

SEQ ID NO: 432 - protein, 42 aa, Artificial Sequence
  A domain
  MOD_RES (1)...(42): Xaa = any amino acid
  DISULFID (1)...(18)
  DISULFID (10)...(31)
  DISULFID (25)...(42)
CXXXXXEFRCAXXXXGRCIPSSWVCDGEDDCGDGSDEXXXXC

SEQ ID NO: 433 - protein, 43 aa, Artificial Sequence
  A domain
  MOD_RES (1)...(43): Xaa = any amino acid
  DISULFID (1)...(18)
  DISULFID (10)...(31)
  DISULFID (25)...(43)
CXXXXXEFRCAXXXXGRCIPSSWVCDGEDDCGDGSDEXXXXXC

SEQ ID NO: 434 - protein, 44 aa, Artificial Sequence
  A domain
  MOD_RES (1)...(44): Xaa = any amino acid
  DISULFID (1)...(18)
  DISULFID (10)...(31)
  DISULFID (25)...(44)
CXXXXXEFRCAXXXXGRCIPSSWVCDGEDDCGDGSDEXXXXXXC

SEQ ID NO: 435 - protein, 43 aa, Artificial Sequence
  A domain
  MOD_RES (1)...(43): Xaa = any amino acid
  DISULFID (1)...(19)
  DISULFID (11)...(32)
  DISULFID (26)...(43)
CXXXXXXEFRCAXXXXGRCIPSSWVCDGEDDCGDGSDEXXXXC

SEQ ID NO: 436 - protein, 44 aa, Artificial Sequence
  A domain
  MOD_RES (1)...(44): Xaa = any amino acid
  DISULFID (1)...(19)
  DISULFID (11)...(32)
  DISULFID (26)...(44)
CXXXXXXEFRCAXXXXGRCIPSSWVCDGEDDCGDGSDEXXXXXC

SEQ ID NO: 437 - protein, 45 aa, Artificial Sequence
  A domain
  MOD_RES (1)...(45): Xaa = any amino acid
  DISULFID (1)...(19)
  DISULFID (11)...(32)
  DISULFID (26)...(45)
CXXXXXXEFRCAXXXXGRCIPSSWVCDGEDDCGDGSDEXXXXXXC

SEQ ID NO: 438 - DNA, 56 bp, Artificial Sequence
  A-domain assembly PCR oligonucleotide 1
  modified_base (1)...(56): n = g, a, c or t
atatcccgggtctggaggcgtctggtggttcgtgtnnknnknnknnkgaattccga

SEQ ID NO: 439 - DNA, 59 bp, Artificial Sequence
  A-domain assembly PCR oligonucleotide 2
  modified_base (1)...(59): n = g, a, c or t
atatcccgggtctggaggcgtctggtggttcgtgtnnknnknnknnknnkgaattccga

SEQ ID NO: 440 - DNA, 62 bp, Artificial Sequence
  A-domain assembly PCR oligonucleotide 3
  modified_base (1)...(62): n = g, a, c or t
atatcccgggtctggaggcgtctggtggttcgtgtnnknnknnknnknnknnkgaattccga

SEQ ID NO: 441 - DNA, 56 bp, Artificial Sequence
  A-domain assembly PCR oligonucleotide 4
  modified_base (1)...(56): n = g, a, c or t
atatcccgggtctggaggcgtctggtggttcgtgttatnnknnknnkgaattccga

SEQ ID NO: 442 - DNA, 59 bp, Artificial Sequence
  A-domain assembly PCR oligonucleotide 5
  modified_base (1)...(59): n = g, a, c or t
atatcccgggtctggaggcgtctggtggttcgtgtnnktatnnknnknnkgaattccga

SEQ ID NO: 443 - DNA, 56 bp, Artificial Sequence
  A-domain assembly PCR oligonucleotide 6
  modified_base (1)...(56): n = g, a, c or t
atatcccgggtctggaggcgtctggtggttcgtgtnnktatnnknnkgaattccga

SEQ ID NO: 444 - DNA, 56 bp, Artificial Sequence
  A-domain assembly PCR oligonucleotide 7
  modified_base (1)...(56): n = g, a, c or t
atatcccgggtctggaggcgtctggtggttcgtgtnnknnktatnnkgaattccga

SEQ ID NO: 445 - DNA, 56 bp, Artificial Sequence
  A-domain assembly PCR oligonucleotide 8
  modified_base (1)...(56): n = g, a, c or t
atatcccgggtctggaggcgtctggtggttcgtgtnnknnknnktatgaattccga

SEQ ID NO: 446 - DNA, 59 bp, Artificial Sequence
  A-domain assembly PCR oligonucleotide 9
  modified_base (1)...(59): n = g, a, c or t
atatcccgggtctggaggcgtctggtggttcgtgtnnknnknnktatnnkgaattccga

SEQ ID NO: 447 - DNA, 49 bp, Artificial Sequence
  A-domain assembly PCR oligonucleotide 10
  modified_base (1)...(49): n = g, a, c or t
atacccaagaagacggtatacatcgtccmnnmnntgcacatcggaattc

SEQ ID NO: 448 - DNA, 52 bp, Artificial Sequence
  A-domain assembly PCR oligonucleotide 11
  modified_base (1)...(52): n = g, a, c or t
atacccaagaagacggtatacatcgtccmnnmnnmnntgcacatcggaattc

SEQ ID NO: 449 - DNA, 55 bp, Artificial Sequence
  A-domain assembly PCR oligonucleotide 12
  modified_base (1)...(55): n = g, a, c or t
atacccaagaagacggtatacatcgtccmnnmnnmnnmnntgcacatcggaattc

SEQ ID NO: 450 - DNA, 52 bp, Artificial Sequence
  A-domain assembly PCR oligonucleotide 13
  modified_base (1)...(52): n = g, a, c or t
atacccaagaagacggtatacatcgtccatamnnmnntgcacatcggaattc

SEQ ID NO: 451 - DNA, 55 bp, Artificial Sequence
  A-domain assembly PCR oligonucleotide 14
  modified_base (1)...(55): n = g, a, c or t
atacccaagaagacggtatacatcgtccmnnatamnnmnntgcacatcggaattc

SEQ ID NO: 452 - DNA, 52 bp, Artificial Sequence
  A-domain assembly PCR oligonucleotide 15
  modified_base (1)...(52): n = g, a, c or t
atacccaagaagacggtatacatcgtccmnnatamnntgcacatcggaattc

SEQ ID NO: 453 - DNA, 52 bp, Artificial Sequence
  A-domain assembly PCR oligonucleotide 16
  modified_base (1)...(52): n = g, a, c or t
atacccaagaagacggtatacatcgtccmnnmnnatatgcacatcggaattc

SEQ ID NO: 454 - DNA, 55 bp, Artificial Sequence
  A-domain assembly PCR oligonucleotide 17
  modified_base (1)...(55): n = g, a, c or t
atacccaagaagacggtatacatcgtccmnnmnnatamnntgcacatcggaattc

SEQ ID NO: 455 - DNA, 55 bp, Artificial Sequence
  A-domain assembly PCR oligonucleotide 18
accgtcttcttgggtatgtgacggggaggacgattgtggtgacggatctgacgag

SEQ ID NO: 456 - DNA, 66 bp, Artificial Sequence
  A-domain assembly PCR oligonucleotide 19
  modified_base (1)...(66): n = g, a, c or t
atatggccccagaggcctgcaatgatccaccgcccccacamnnmnnmnnmnnctcgtcagatccgt

SEQ ID NO: 457 - DNA, 69 bp, Artificial Sequence
  A-domain assembly PCR oligonucleotide 20
  modified_base (1)...(69): n = g, a, c or t
atatggccccagaggcctgcaatgatccaccgcccccacamnnmnnmnnmnnmnnctcgtcagatccgt

SEQ ID NO: 458 - DNA, 72 bp, Artificial Sequence
  A-domain assembly PCR oligonucleotide 21
  modified_base (1)...(72): n = g, a, c or t
atatggccccagaggcctgcaatgatccaccgcccccacamnnmnnmnnmnnmnnmnnctcgtcagatccgt

SEQ ID NO: 459 - DNA, 66 bp, Artificial Sequence
  A-domain assembly PCR oligonucleotide 22
  modified_base (1)...(66): n = g, a, c or t
atatggccccagaggcctgcaatgatccaccgcccccacaatamnnmnnmnnctcgtcagatccgt

SEQ ID NO: 460 - DNA, 69 bp, Artificial Sequence
  A-domain assembly PCR oligonucleotide 23
  modified_base (1)...(69): n = g, a, c or t
atatggccccagaggcctgcaatgatccaccgcccccacamnnatamnnmnnmnnctcgtcagatccgt

SEQ ID NO: 461 - DNA, 66 bp, Artificial Sequence
  A-domain assembly PCR oligonucleotide 24
  modified_base (1)...(66): n = g, a, c or t
atatggccccagaggcctgcaatgatccaccgcccccacamnnatamnnmnnctcgtcagatccgt

SEQ ID NO: 462 - DNA, 66 bp, Artificial Sequence
  A-domain assembly PCR oligonucleotide 25
  modified_base (1)...(66): n = g, a, c or t
atatggccccagaggcctgcaatgatccaccgcccccacamnnmnnatamnnctcgtcagatccgt

SEQ ID NO: 463 - DNA, 66 bp, Artificial Sequence
  A-domain assembly PCR oligonucleotide 26
  modified_base (1)...(66): n = g, a, c or t
atatggccccagaggcctgcaatgatccaccgcccccacamnnmnnmnnatactcgtcagatccgt

SEQ ID NO: 464 - DNA, 69 bp, Artificial Sequence
  A-domain assembly PCR oligonucleotide 27
  modified_base (1)...(69): n = g, a, c or t
atatggccccagaggcctgcaatgatccaccgcccccacamnnmnnmnnatamnnctcgtcagatccgt

SEQ ID NO: 465 - protein, 35 aa, Artificial Sequence
  canonical A-domain sequence
  MOD_RES (1)...(35): Xaa = any amino acid, high-diversity position
CXXXXFXCXXXXCIXXXWXCDGXXDCXDXSDEXXC

SEQ ID NO: 466 - DNA, 40 bp, Artificial Sequence
  PCR amplification VS-For primer
atcatctggccggtccggcctacccgtatgatgttccgga

SEQ ID NO: 467 - DNA, 29 bp, Artificial Sequence
  PCR amplification EveNut primer
aaaaggccccagaggccttctgcaatgac

SEQ ID NO: 468 - DNA, 21 bp, Artificial Sequence
  PCR fragment overlap reaction oligo for intra-domain optimization by recombination, 5-7 NNK
  modified_base (1)...(21): n = g, a, c or t
  modified_base (16)...(21): positions 16-21 may be present or absent
nnknnknnknnknnknnknnk

SEQ ID NO: 469 - protein, 6 aa, Artificial Sequence
  segment of single improved monomer domain
SREVDK

SEQ ID NO: 470 - protein, 6 aa, Artificial Sequence
  segment of single improved monomer domain
VSTRGG

SEQ ID NO: 471 - protein, 6 aa, Artificial Sequence
  segment of single improved monomer domain
KLEVST
